(19) United States
(12) Patent Application Publication
(10) Pub. No.: US 2024/0189416 A1
(43) Pub. Date: Jun. 13, 2024

(54) STABILIZED CORONAVIRUS SPIKE PROTEIN FUSION PROTEINS

(71) Applicant: Janssen Pharmaceuticals, Inc., Titusville, NJ (US)

(72) Inventors: Jaroslaw JURASZEK, Amsterdam (NL); Johannes Petrus Maria LANGEDIJK, Amsterdam (NL); Lucy RUTTEN, Rijnsburg (NL)

(21) Appl. No.: 17/998,592

(22) PCT Filed: May 11, 2021
(86) PCT No.: PCT/EP2021/062461

§ 371 Date: Nov. 11, 2022

Related U.S. Application Data
(60) Provisional application No. 63/022,776, filed on May 11, 2020.
(60) Provisional application No. 62/705,579, filed on Jul. 6, 2020.

(51) Int. Cl. A61K 39/215; A61P 31/14; C07K 14/005; C12N 7/00; C12N 15/86

(52) U.S. Cl. CPC A61K 39/215; A61P 31/14; C07K 14/005; C12N 7/00; C12N 15/86; C12N 2710/10043; C12N 2770/20022; C12N 2770/20034

(57) ABSTRACT

The present invention provides stabilized recombinant pre-fusion SARS COV-2 S proteins, nucleic acids molecules encoding the SARS-COV-2 S proteins and uses thereof.

### CROSS-REFERENCE TO RELATED APPLICATIONS

[0001] This application is a Section 371 of International Application No. PCT/EP2021/062461 filed May 11, 2021, which was published in the English language Nov. 18, 2021, under International Publication No. WO 2021/228842 A1, which claims priority under 35 U.S.C. § 119(b) to U.S. Patent Application No. 63/022,776, filed May 11, 2020, and to U.S. Patent Application No. 62/705,579, filed Jul. 6, 2020, the disclosures of each of which are incorporated herein by reference in their entireties.

### REFERENCE TO SEQUENCE LISTING SUBMITTED ELECTRONICALLY

[0002] This application contains a sequence listing, which is submitted electronically via EFS-Web as an ASCII formatted sequence listing with a file name of “CRU6045WOPCT1_Sequence_Listing” creation date of Nov. 11, 2021 and having a size of 4.49 MB. The sequence listing submitted via EFS-Web is part of the specification and is herein incorporated by reference in its entirety.

[0003] The present invention relates to the field of medicine. The invention in particular relates to stabilized recombinant pre-fusion Coronavirus spike (S) proteins, in particular to SARS-COV-2 S proteins, to nucleic acid molecules encoding said SARS-COV-2 S proteins, and uses thereof, e.g. in vaccines.

### BACKGROUND OF THE INVENTION

[0004] Corona viruses (CoVs) are viruses responsible for mild respiratory tract infections and atypical pneumonia in humans. CoVs are a large family of enveloped, single-stranded positive-sense RNA viruses belonging to the order Nidovirales, which can infect a broad range of mammalian species including cats, dogs, cows, bats, and humans, and avian species. Coronaviruses possess large, trimeric spike glycoproteins (S) that mediate binding to host cell receptors as well as fusion of viral and host cell membranes. The Coronavirus family contains the genera Alphacoronavirus, Betacoronavirus, Gammacoronavirus, and Deltacoronavirus. These viruses cause a range of diseases including enteric and respiratory diseases. The host range is primarily determined by the viral spike protein (S protein), which mediates entry of the virus into host cells. Coronaviruses that can infect humans are found both in the genus Alphacoronavirus and the genus Betacoronavirus. Known coronaviruses of the genus Betacoronavirus that cause respiratory disease in humans include SARS-COV, MERS-COV, HCoV-OC43 and HCoV-HKU1, and the currently circulating SARS-COV-2.

[0005] SARS-COV-2 is a coronavirus that emerged in humans from an animal reservoir in 2019 and rapidly spread globally. SARS-COV-2 is a Betacoronavirus, like MERS-COV and SARS-COV, all of which have their origin in bats. The name of the disease caused by the virus is coronavirus disease 2019, abbreviated as COVID-19. Symptoms of COVID-19 range from mild symptoms to severe illness and death for confirmed COVID-19 cases.

[0006] It is well known that viruses constantly change through mutation, and new virus variants are expected to occur over time. Sometimes new variants emerge and disappear. Other times, new variants emerge and persist. Multiple variants of the virus that causes COVID-19 have already been identified globally during this pandemic. Scientists are continuously monitoring changes in the virus, including changes to the spike protein on the surface of the virus. In collaboration with a SARS-COV-2 Interagency Group (SIG), CDC established 3 classifications for the SARS-COV-2 variants being monitored: Variant of Interest (VOI), Variant of Concern (VOC), and Variant of High Consequence (VOHC). There are currently several VOCs identified, including:

[0007] B.1.1.7: This variant was initially detected in the UK.

[0008] B.1.351: This variant was initially detected in South Africa in December 2020.

[0009] P.1: This variant was initially identified in travelers from Brazil, who were tested during routine screening at an airport in Japan, in early January.

[0010] B.1.427 and B.1.429: These two variants were first identified in California in February 2021 and were classified as VOCs in March 2021.

[0011] The B.1.526, B.1.526.1, B.1.525, B.1.617, B. 1.617.1, B. 1.617.2, B. 1.617.3, and P.2 variants circulating in the United States are classified as variants of interest.”

[0012] The B.1.1.7, B. 1.351, P.1, B.1.427, and B. 1.429 variants circulating in the United States are classified as variants of concern.

[0013] In the case of SARS-COV-2 the S protein is the major surface protein. The S protein forms homotrimers and is composed of an N-terminal S1 subunit and a C-terminal S2 subunit, responsible for receptor binding and membrane fusion, respectively. Recent cryo-EM reconstructions of the CoV trimeric S structures of alpha-, beta-, and deltacoronaviruses revealed that the S1 subunit comprises two distinct domains: an N-terminal domain (S1 NTD) and a receptor-binding domain (S1 RBD). SARS-COV-2 makes use of its S1 RBD to bind to human angiotensin-converting enzyme 2 (ACE2) (Hoffmann et. al. (2020): Wrapp et. al. (2020)).

[0014] Coronaviridae S proteins are classified as class I fusion proteins and are responsible for fusion. The S protein fuses the viral and host cell membranes by irreversible protein refolding from the labile pre-fusion conformation to the stable post-fusion conformation. Like many other class I fusion proteins, Coronavirus S protein requires receptor binding and cleavage for the induction of conformational change that is needed for fusion and entry (Belouzard et al. (2009): Follis et al. (2006); Bosch et al. (2008), Madu et al. (2009): Walls et al. (2016)). Priming of SARS-COV2 involves cleavage of the S protein by furin at a furin cleavage site at the boundary between the S1 and S2 subunits (S1/S2), and by TMPRSS2 at a conserved site upstream of the fusion peptide (S2′) (Bestle et al. (2020); Hoffmann et. al. (2020)).

[0015] In order to refold from the pre-fusion to the post-fusion conformation, there are two regions that need to refold, which are referred to as the refolding region 1 (RR1) and refolding region 2 (RR2) (FIG. 1). For all class I fusion proteins, the RR1 includes the fusion peptide (FP) and heptad repeat 1 (HR1). After cleavage and receptor binding the stretch of helices, loops and strands of all three protomers in the trimer transform to a long continuous trimeric helical coiled-coil. The FP, located at the N-terminal segment of RR1, is then able to extend away from the viral membrane and inserts in the proximal membrane of the target cell. Next, the refolding region 2 (RR2), which is located C-terminal to RR1, and closer to the transmembrane region (TM) and which includes the heptad repeat 2 (HR2), relocates to the other side of the fusion protein and binds the HR1 coiled-coil trimer with the HR2 domain to form the six-helix bundle (6HB).

[0016] When viral fusion proteins, like the SARS-COV-2 S protein, are used as vaccine components, the fusogenic function of the proteins is not important. In fact, only the mimicry of the vaccine component to the virus is important to induce reactive antibodies that can bind the virus. Therefore, for development of robust efficacious vaccine components it is desirable that the meta-stable fusion proteins are maintained in their pre-fusion conformation. It is believed that a stabilized fusion protein, such as a SARS-COV-2 S protein, in the pre-fusion conformation can induce an efficacious immune response.

[0017] In recent years several attempts have been made to stabilize various class I fusion proteins, including Coronavirus S proteins. A particularly successful approach was shown to be the stabilization of the so-called hinge loop at the end of RR1 preceding the base helix (WO2017/037196, Krarup et al. (2015); Rutten et al. (2020), Hastie et al. (2017)). This approach has also proved successful for Coronavirus S proteins, as shown for SARS-COV, MERS-COV and SARS-COV2 (Pallesen et al. (2016): Wrapp et al. (2020)). Although the proline mutations in the hinge loop indeed increase the expression of the Coronavirus S protein, the S protein may still suffer from instability. Thus, for improved vaccine design or S proteins which can for example be used as tools, e.g. as a bait for monoclonal antibody isolation, further stabilization is desired.

[0018] Since the novel SARS-COV-2 virus was first observed in humans in late 2019, over 154 million people have been infected and more than 3 million have died as a result of COVID-19, in particular because SARS-COV-2, and corona viruses more generally, lack effective treatment. In addition, there is currently no vaccine available to prevent coronavirus induced disease (COVID-19), leading to a large unmet medical need. Since emerging infectious diseases, such as COVID-19, present a major threat to public health and economic systems, there is an urgent need for novel components that can be used e.g. in vaccines to prevent coronavirus induced respiratory disease.

### SUMMARY OF THE INVENTION

[0019] The invention provides recombinant SARS-COV-2 S proteins that have improved trimer yields and/or improved (thermal) stability as compared to previously described SARS-CoV-2 S proteins.

[0020] The present invention also provides stabilized, recombinant, pre-fusion SARS-COV-2 S proteins, i.e. SARS-COV-2 S proteins that are stabilized in the pre-fusion conformation, and fragments thereof.

[0021] In certain embodiments, the pre-fusion SARS-COV-2 S proteins are soluble proteins, preferably trimeric soluble proteins.

[0022] The resulting stable pre-fusion SARS-COV-2 S protein trimers are useful for immunization (vaccination) purposes, e.g. to improve chances of inducing broadly neutralizing antibodies and reducing induction of non-neutralizing and weakly neutralizing antibodies upon administration of the recombinant stabilized SARS-COV-2 S protein trimers or nucleic acid encoding the stabilized SARS-COV-2 S protein trimers.

[0023] The invention also provides nucleic acid molecules encoding the pre-fusion SARS-CoV-2 S proteins and fragments thereof, as well as vectors, e.g. adenovectors, comprising such nucleic acid molecules.

[0024] The invention further provides methods of stabilizing SARS-COV2 S proteins in the pre-fusion conformation, and to the pre-fusion SARS-COV-2 S proteins obtainable by said methods.

[0025] The invention moreover provides compositions, preferably immunogenic compositions, comprising a SARS-COV-2 S protein, or a fragment thereof, a nucleic acid molecule and/or a vector, as described herein.

[0026] The invention also provides compositions for use in inducing an immune response against SARS-COV-2 S protein, and in particular to the use thereof as a vaccine against SARS-COV-2 associated disease, such as COVID-19.

[0027] The invention also relates to methods for inducing an immune response against SARS-COV-2 in a subject, comprising administering to the subject an effective amount of a pre-fusion SARS-COV-2 S protein or a fragment thereof, a nucleic acid molecule encoding said SARS-COV-2 S protein, and/or a vector comprising said nucleic acid molecule, as described herein. Preferably, the induced immune response is characterized by the induction of neutralizing antibodies to the SARS-COV-2 virus and/or protective immunity against the SARS-COV-2 virus.

[0028] In particular aspects, the invention relates to methods for inducing anti-SARS-COV-2 S protein antibodies in a subject, comprising administering to the subject an effective amount of an immunogenic composition comprising a pre-fusion SARS-COV-2 S protein, or a fragment thereof, a nucleic acid molecule encoding said SARS-COV-2 S protein, and/or a vector comprising said nucleic acid molecule, as described herein.

[0029] The invention also relates to the use of the SARS-COV-2 S proteins or fragments thereof, as described herein, for isolating monoclonal antibodies against a SARS-COV-2 S protein from infected humans.

[0030] Also provided is the use of the pre-fusion SARS-COV-2 S proteins of the invention in methods of screening for candidate SARS-COV-2 antiviral agents, including but not limited to antibodies against SARS-COV-2.

[0031] In another general aspect, the invention relates to an isolated nucleic acid molecule encoding a recombinant SARS-COV-2 S protein of the invention and vectors comprising the isolated nucleic acid molecule operably linked to a promoter. In one embodiment, the vector is a viral vector. In another embodiment, the vector is an expression vector. In one preferred embodiment, the viral vector is an adenovirus vector.

[0032] Another general aspect relates to a host cell comprising the isolated nucleic acid molecule or vector encoding the recombinant SARS-COV-2 S protein of the invention. Such host cells can be used for recombinant protein production, recombinant protein expression, or the production of viral particles.

[0033] Another general aspect relates to methods of producing a recombinant SARS-COV-2 S protein, comprising growing a host cell comprising an isolated nucleic acid molecule or vector encoding the recombinant SARS-COV-2 S protein of the invention under conditions suitable for production of the recombinant SARS-COV-2 S protein.

### BRIEF DESCRIPTION OF THE DRAWINGS

[0034] The foregoing summary, as well as the following detailed description of the invention, will be better understood when read in conjunction with the appended drawings. It should be understood that the invention is not limited to the precise embodiments shown in the drawings.

[0035] FIG. 1: Schematic representation of the conserved elements of the fusion domain of a SARS-CoV-2 S protein. The head domain contains an N-terminal (NTD) domain, the receptor binding domain (RBD) and domains SD1 and SD2. The fusion domain contains the fusion peptide (FP), refolding region 1 (RR1), refolding region 2 (RR2), transmembrane region (TM) and cytoplasmic tail. Cleavage site between S1 and S2 and the S2′ cleavage sites are indicated with arrow.

[0036] FIG. 2: Analytical SEC samples of semi-stable SARS-COV-2 S trimer proteins after freeze thaw cycles. S trimer protein according to SEQ ID NO: 3 (A) and the same protein in which the tag was replaced by a C-tag (B) after flash freezing in liquid Nitrogen and thawing 1 time (dark solid line) and 5 times (light solid line), compared with unfrozen S protein (dashed line). The peak at 5 minutes corresponds to the S trimer.

[0037] FIG. 3: Percentage of S trimer expression for S proteins with indicated mutations as measured by ACE2-Fc binding in AlphaLISA assay compared with control unstable uncleaved SARS-COV-2 S (with furin site mutation) (SEQ ID NO: 2). The recombinant S proteins tested contain a single amino acid substitution, as indicated in the figure, introduced into the backbone of unstable uncleaved SARS-COV-2 S ectodomain (SEQ ID NO: 2) (Furin KO, left panel) and into the backbone of the semi-stable uncleaved SARS-COV-2 S with the double proline mutations in the hinge loop at position 986 and 987 (SEQ ID NO: 3) (Furin KO+PP, right panel). Analysis was performed on crude cell culture supernatants.

[0038] FIG. 4: Analytical SEC profile of semi-stabilized uncleaved SARS-COV-2 S with two stabilizing mutations to Proline in the hinge loop (+PP) (SEQ ID NO: 3) (A-C) and unstable uncleaved SARS-COV-2 S protein (SEQ ID NO: 2) (D-F) (dashed lines), compared to variants with indicated point mutations (A, D) A892P, (B, E) A942P, (C, F) D614N in black, D614M in dark grey and D614L in light grey (solid lines). Analysis was performed on crude cell culture supernatants. The peak at 5 minutes corresponds to the S trimer. G) SEC-MALS with purified stabilized S protein with A942P mutation (SEQ ID NO: 5). SEC signal is shown in grey thick line and corresponding to the left axis. The black thin line shows the molar mass traces (right y axis). The dn/dc value used is 0.185.

[0039] FIG. 5: Percentage of S trimer expression for S proteins with indicated mutations as measured by ACE2-Fc binding in AlphaLISA assay compared with control unstable uncleaved SARS-CoV-2 S (with furin site mutation) (SEQ ID NO: 2). The recombinant S proteins tested contain single amino acid substitution or a disulfide bridge, as indicated in the figure, introduced into the backbone of unstable uncleaved SARS-COV2 S ectodomain (SEQ ID NO: 2) (Furin KO, left panel) and into the backbone of semi-stable uncleaved SARS-COV-2 S with the double proline in the hinge loop at position 986 and 987 (SEQ ID NO: 3) (Furin KO+PP, right panel). Analysis was performed on crude cell culture supernatants.

[0040] FIG. 6: Analytical SEC profile of semi-stabilized uncleaved SARS-COV2 S+PP (SEQ ID NO: 3) (A-D) and unstable uncleaved SARS-COV2 S protein (SEQ ID NO: 2) (E-H) (dashed lines), compared to variants with indicated point mutation or disulfide bridge (solid line). Analysis was performed on crude cell culture supernatants. The peak at 5 minutes corresponds to the S trimer.

[0041] FIG. 7: Percentage of S trimer expression for S proteins with indicated mutations as measured by ACE2-Fc binding in AlphaLISA assay compared with control unstable uncleaved SARS-CoV-2 S (with furin site mutation) (SEQ ID NO: 2). The recombinant S proteins tested contain single amino acid substitution as indicated in the figure, introduced into the backbone of unstable uncleaved SARS-COV2 S ectodomain (SEQ ID NO: 2) (A). Analytical SEC profile of unstable uncleaved SARS-COV2 S (SEQ ID NO: 2 (dashed lines), compared to variants with indicated point mutation (solid line). Analysis was performed on crude cell culture supernatants. The peak at 5 minutes corresponds to the S trimer. Analysis was performed on crude cell culture supernatants.

[0042] FIG. 8: Temperature stability of purified S trimers as measured by DSC. Two melting events are indicated by Tm1 and Tm2. Uncleaved SARS2-S variants corresponding to SEQ ID NO: 2 (comprising a furin KO), with one stabilizing proline mutation in the hinge loop (furin KO K986P or furin KO V987P), and both proline mutations in the hinge loop (SEQ ID NO: 3, S-2P) (A). Uncleaved variants with indicated mutations in S1 (B) and uncleaved variants with indicated mutations in S2 (C).

[0043] FIG. 9: Cell-cell fusion assay. Full-length wildtype SARS-COV-2 spike protein and variants thereof (indicated in boxes within the images), human ACE2, human TMPRSS2 and GFP were co-expressed in HEK293 cells. Redistribution of the GFP signal was used to visualize syncytia formation. The furin KO, the PP mutations and the two cystines completely abolish fusogenicity, whereas all the individual point mutants still allow fusion to occur. This implies that the single point mutants still allow the S protein to sample all possible conformational intermediates between prefusion and postfusion states.

[0044] FIG. 10: Analytical SEC profile of uncleaved SARS-COV2 S (SEQ ID NO: 2 (dashed lines)), compared to variants with indicated point mutations (solid lines) (A). The recombinant S proteins tested contain single amino acid substitution or multiple mutations as indicated in the figure. The peak at 5 minutes corresponds to the S trimer. Amount of ACE2-Fc binding for S proteins with indicated mutations as measured by AlphaLISA assay compared with control unstable uncleaved SARS-COV-2 S (with furin site mutation) (SEQ ID NO: 2) (B). Analysis was performed on crude cell culture supernatants. Analytical SEC with comparison of semistabilized S trimer ((K986P+V987P, SEQ ID NO: 3) with variants containing indicated four stabilizing mutations with or without (DF) foldon (C). Temperature stability of purified uncleaved S trimers with indicated stabilizing mutations as measured by DSC. Variants without foldon trimerization domain are indicated with no-Fd (D).

[0045] FIG. 11: Freeze-thaw stability of purified uncleaved S trimers with indicated stabilizing mutations as measured by analytical SEC. Chromatograms are shown for non-frozen 1×frozen and 3×frozen. Right panel is S trimer without foldon trimerization site (delta foldon).

[0046] FIG. 12: Binding of SAD-S35, ACE2-Fc, and CR3022 to 986P+987P variants, novel single point mutations and disulfide bridge, and variants with combination of mutations measured with BioLayer Interferometry, showing the initial slope at the start of binding (A-C). Binding at equilibrium of S309, ACE2 and CR3022 with the semistabilized variant (FurinKO+PP, SEQ ID NO:3) and the stabilized variant with 4 stabilizing mutations without foldon after 2 weeks of storage at 4 degrees (D).

[0047] FIG. 13: Western blot stained with both 1A9 (GeneTex) antibody detecting S2 of the SARS-CoV-2 spike protein and anti-Beta actin (AC-15) primary antibody (Abcam, ab6276). Since the four full length spikes 660, 662, 007 and 664 all have a furin cleavage site knock out, the intact S protein is detected. Cell culture supernatants were loaded, which could contain exosomes, produced after the membranes of the Expi293F cells are saturated with incorporated spikes. A molecular weight marker was loaded in lane 1. The lane indicated with pcDNA shows supernatant of cells that were transfected with empty pcDNA vector.

[0048] FIG. 14: Luminescence intensities measured with cell-based ELISA (CBE). Luminescence was calculated as an average of a duplicate.

[0049] FIG. 15: Binding of a panel of antibodies (on X-axis) to three proteins used for immunization of mice, measured with BioLayer Interferometry, showing the initial slope VO at the start of binding.

[0050] FIG. 16: A. SARS-COV-2 L-0008 (lineage B.1) isolate neutralizing antibody titers were measured by a wild-type VNA (wtVNA) at day 27. As the number of samples for the wtVNAwas limited not all samples were measured for the 0.5 μg COR201225 (n=5), COR200619 (n=5) and COR200627 (n=6) groups. SARS-COV-2 B.1 Spike protein neutralizing antibody titers induced by the invention as measured with a lentiviral pseudo particle neutralization assay (psVNA) at B. day 27 and C. day 41. 2 mice were excluded as there was not enough serum left to perform the psVNA at day 27 on these samples. The value above each x-axis are the group geometric mean titers. Horizontal bars per group denote group geometric means. Dashed horizontal lines denote the Lower Limit Of Detection (LLOD) and the Upper Limit of Detection.

[0051] FIG. 17: Analytical SEC profile of semi-stabilized uncleaved SARS-COV-2 S with two stabilizing mutations to Proline in the hinge loop (+PP) and a foldon (SEQ ID NO: 3) shown with a dashed line and a more stabilized S protein without the PP and without a foldon shown with a solid line (COR201291).

[0052] FIG. 18: Cryo-EM data processing workflow. A typical micrograph, representing approximately 75% of 9760 micrographs is shown as well as representatives 2D classes. 3D classification was performed to distinguish heterogeneity in the sample and the classes showing the highest resolution were refined.

[0053] FIG. 19: Resolution assessment of cryo-EM structure: A) Local resolution map for closed structure (Full map, slide through, top view) B) Local resolution map for “one up” structure (Full map, slide through, top view) C) Global resolution assessment by Fourier shell correlation at the 0.143 criterion D) Correlations of model vs map by Fourier shell correlation at the 0.5 criterion.

### DETAILED DESCRIPTION OF THE INVENTION

[0054] As explained above, the spike protein (S) of SARS-COV-2 and of other Corona viruses is involved in fusion of the viral membrane with a host cell membrane, which is required for infection. SARS-COV-2 S RNA is translated into a 1273 amino acid precursor protein, which contains a signal peptide sequence at the N-terminus (e.g. amino acid residues 1-13 of SEQ ID NO: 1) which is removed by a signal peptidase in the endoplasmic reticulum. Priming of the S protein typically involves cleavage by host proteases at the boundary between the S1 and S2 subunits (S1/S2) in a subset of coronaviruses (including SARS-COV-2), and at a conserved site upstream of the fusion peptide (S2′) in all known corona viruses. For SARS-COV-2, furin cleaves at S1/S2 between residues 685 and 686 and subsequently within S2 at the S2′ site between residues at position 815 and 816 by TMPRSS2. C-terminal to the S2′ site the proposed fusion peptide is located at the N-terminus of the refolding region 1 (FIG. 1).

[0055] Several vaccines against SARS-COV-2 infection are currently available. Several different vaccine modalities are possible, such as RNA or vector-based vaccines, and/or subunit vaccines based on purified S protein. Since class I proteins are metastable proteins, increasing the stability of the pre-fusion conformation of fusion proteins increases the expression level of the protein because less protein will be misfolded and more protein will successfully transport through the secretory pathway. Therefore, if the stability of the pre-fusion conformation of the class I fusion protein, like SARS-COV-2 S protein is increased, the immunogenic properties of a vector-based vaccine will be improved since the expression of the S protein is higher and the conformation of the immunogen resembles the pre-fusion conformation that is recognized by potent neutralizing and protective antibodies. For subunit-based vaccines, stabilizing the pre-fusion S conformation is even more important. In addition, it is important that the stabilized S proteins have improved trimer yields as compared to previously described SARS-COV-2 S protein trimers. Besides the importance of high expression, which is needed to manufacture a vaccine successfully, maintenance of the trimeric pre-fusion conformation during the manufacturing process and during storage over time is critical for protein-based vaccines. In addition, for a soluble, subunit-based vaccine, the SARS-COV-2 S protein needs to be truncated by deletion of the transmembrane (TM) and the cytoplasmic region to create a soluble secreted S protein (sS). Because the TM region is responsible for membrane anchoring and increases stability, the anchorless soluble S protein is considerably more labile than the full-length protein and will even more readily refold into the post-fusion end-state. In order to obtain soluble trimeric S protein in the stable pre-fusion conformation that shows high expression levels and high stability, the pre-fusion conformation thus needs to be stabilized. Because also the full length (membrane-bound) SARS-COV-2 S protein is metastable, the stabilization of the pre-fusion conformation is also desirable for the full-length SARS-COV-2 S protein, i.e. including the TM and cytoplasmic region, e.g. for any DNA, RNA, live attenuated or vector-based vaccine approach.

[0056] The present invention provides recombinant SARS-COV-2 S proteins that have improved trimer yields and/or improved (thermal) stability as compared to previously described SARS-COV-2 S proteins.

[0057] The present invention thus provides stabilized, recombinant pre-fusion SARS-COV-2 S proteins, comprising an S1 and an S2 domain, and comprising at least one mutation selected from the group consisting of a mutation of at least one amino acid in the loop region corresponding to amino acid residues 941-945 into P, a mutation of the amino acid at position 892, a mutation of the amino acid at position 614, a mutation at position 572, a mutation at position 532, a disulfide bridge between residues 880 and 888, and a disulfide bridge between residues 884 and 893, wherein the numbering of the amino acid positions is according to the numbering of the amino acid positions in SEQ ID NO: 1, and fragments thereof. According to the invention it has been demonstrated that the presence of specific amino acids and/or a disulfide bridge at the indicated positions increase the stability of the proteins in the pre-fusion conformation. According to the invention, the specific amino acids or disulfide bridges are introduced by substitution (mutation) of the amino acid at that position into a specific amino acid according to the invention. According to the invention, the proteins thus comprise one or more mutations in their amino acid sequence, i.e. the naturally occurring amino acid at these positions has been substituted with another amino acid. In certain embodiments, the proteins comprise an amino acid sequences, wherein the amino acid at position 892 is not alanine (A), the amino acid at position 614 is not aspartic acid (D), the amino acid at position 532 is not Asparagine (N) and/or amino acid at position 572 is not threonine (T).

[0058] In certain embodiments, the proteins comprise at least two mutations comprising a mutation of at least one amino acid in the loop region corresponding to amino acid residues 941-945 into P, and a mutation selected from the group consisting of a mutation of the amino acid at position 892, a mutation of the amino acid at position 614, a mutation at position 572, a mutation at position 532, a disulfide bridge between residues 880 and 888 and a disulfide bridge between residues 884 and 893.

[0059] In certain embodiments, the proteins comprise at least two mutations comprising a mutation of at least one amino acid in the loop region corresponding to amino acid residues 941-945 into P, and a mutation selected from the group consisting of a mutation of the amino acid at position 892, a mutation of the amino acid at position 614, a mutations at position 572 and a mutations at position 532, a disulfide bridge between residues 880 and 888 and a disulfide bridge between residues 884 and 893, provided that the proteins do not comprise both the disulfide bridge between residues 880 and 888 and the disulfide bridge between residues 884 and 893.

[0060] In certain embodiments, the proteins thus comprise a mutation of at least one amino in the loop region corresponding to amino acid residues 941-945 into P, a mutation of the amino acid at position 892, a mutation of the amino acid at position 614, a mutation of the amino acid at position 572, and/or a mutation at position 532, and/or either a disulfide bridge between residues 880 and 888 or a disulfide bridge between residues 884 and 893.

[0061] In a preferred embodiment, the disulfide bridge is a disulfide bridge between residues 880 and 888. According to the invention it is to be understood that “a disulfide bridge between residues 880 and 880” means that the amino acids at the positions 880 and 888 have been mutated into C. Similarly, it is to be understood that “a disulfide bridge between residues 884 and 893” means that the amino acids at the positions 884 and 893 have been mutated into C

[0062] In certain embodiments, the at least one mutation in the loop region corresponding to amino acid residues 941-945 is a mutation of the amino acid at position 942 into P. Alternatively, or in addition, the at least one mutation in the loop region corresponding to amino acid residues 941-945 is a mutation of the amino acid at position 941 into P.

[0063] Alternatively, or in addition, the at least one mutation in the loop region corresponding to amino acid residues 941-945 is a mutation of the amino acid at position 944 into P.

[0064] Alternatively, or in addition, the mutation at position 892 is a mutation into P.

[0065] Alternatively, or in addition, the mutation at position 614 is a mutation into N or G.

[0066] Alternatively, or in addition, the mutation at position 532 is a mutation into P.

[0067] Alternatively, or in addition, the mutation at position 572 is a mutation into I.

[0068] The invention thus also provides stabilized, recombinant pre-fusion SARS-COV-2 S proteins, comprising an S1 and an S2 domain, wherein the amino acid at position 941, 942 or 944 is P, the amino acid at position 892 is P, the amino acid at position 614 is N or G, the amino acid at position 572 is I, and/or the amino acid at position 532 is P, and/or comprising a disulfide bridge between residues 880 and 888, and/or a disulfide bridge between residues 884 and 893, wherein the numbering of the amino acid positions is according to the numbering of the amino acid positions in SEQ ID NO: 1.

[0069] In a preferred embodiment, the amino acid at position 892 is proline (P), the amino acid at position 614 is asparagine (N) or glycine (G), the amino acid at position 942 is proline (P) or the amino acid at position 944 is proline (P).

[0070] An amino acid according to the invention can be any of the twenty naturally occurring (or ‘standard’ amino acids) or variants thereof, such as e.g. D-amino acids (the D-enantiomers of amino acids with a chiral center), or any variants that are not naturally found in proteins, such as e.g. norleucine. Each known natural amino acid has a full name, an abbreviated one letter code, and an abbreviated three letter code, all of which are well known to those of ordinary skill in the art. For example, the three and one letter abbreviated codes used for the twenty naturally occurring amino acids are as follows: alanine (Ala: A), arginine (Arg: R), aspartic acid (Asp: D), asparagine (Asn: N), cysteine (Cys: C), glycine (Gly: G), glutamic acid (Glu: E), glutamine (Gln: Q), histidine (His: H), isoleucine (Ile: I), leucine (Leu: L), lysine (Lys: K), methionine (Met: M), phenylalanine (Phe: F), proline (Pro: P), serine (Ser; S), threonine (Thr: T), tryptophan (Trp: W), tyrosine (Tyr: Y) and valine (Val: V). Amino acids can be referred to by their full name, one letter abbreviated code, or three letter abbreviated code. The standard amino acids can be divided into several groups based on their properties. Important factors are charge, hydrophilicity or hydrophobicity, size and functional groups. These properties are important for protein structure and protein-protein interactions. Some amino acids have special properties such as cysteine, that can form covalent disulfide bonds (or disulfide bridges) to other cysteine residues, proline that induces turns of the polypeptide backbone, and glycine that is more flexible than other amino acids. Table 1 shows the abbreviations and properties of the standard amino acids.

[0071] It will be appreciated by a skilled person that the mutations can be made to the protein by routine molecular biology procedures.

[0072] In certain embodiments, the present invention provides recombinant SARS-COV-2 S proteins, and fragments thereof, wherein the amino acid at position 942 is P, the amino acid at position 892 is P, the amino acid at position 614 is N or G, the amino acid at position 532 is P and/or the amino acid at position 572 is I, and/or which comprise a disulfide bridge between residues 880 and 888 or a disulfide bridge between residues 884 and 893, wherein the numbering of the amino acid positions is according to the numbering of the amino acid positions in SEQ ID NO: 1.

[0073] In a preferred embodiment, the invention provides SARS-COV-2 proteins or fragments thereof, wherein the amino acid at position 942 is P, the amino acid at position 614 is N or G, and which comprise a disulfide bridge between residues 880 and 888, wherein the numbering of the amino acid positions is according to the numbering of the amino acid positions in SEQ ID NO: 1.

[0074] In certain embodiments, the SARS-COV-2 S proteins further comprise a deletion of the furin cleavage site. A deletion of the furin cleavage, e.g. by mutation of one or more amino acids in the furin cleavage site (such that the protein is not cleaved by furin), renders the protein uncleaved, which further increases its stability. Deleting the furin cleavage site can be achieved in any suitable way that is known to the skilled person. In certain embodiments, the deletion of the furin cleavage site comprises a mutation of the amino acid at position 682 into S and/or a mutation of the amino acid at position 685 into G.

[0075] In certain embodiments, the proteins further comprise a mutation of the amino acids at position 986 and/or 987 into proline. In certain embodiments, the amino acid at position 986 is not proline. In certain embodiments, the amino acid at position 986 is K and the amino acid at position 987 is P.

[0076] In preferred embodiments, the present invention provides recombinant SARS-COV-2 S proteins, and fragments thereof, comprising a deletion of the furin cleavage site, and wherein the amino acid at position 942 is P, the amino acid at position 892 is P, the amino acid at position 987 is P, wherein the numbering of the amino acid positions is according to the numbering of the amino acid positions in SEQ ID NO: 1.

[0077] In another preferred embodiment, the present invention provides recombinant SARS-CoV-2 S proteins, and fragments thereof, comprising a deletion of the furin cleavage site and wherein the amino acid at position 942 is P, the amino acid at position 892 is P, the amino acid at position 614 is N or G, the amino acid at position 987 is P, wherein the numbering of the amino acid positions is according to the numbering of the amino acid positions in SEQ ID NO: 1.

[0078] In another preferred embodiment, the SARS-COV-2 S proteins comprise a deletion of the furin cleavage site and the amino acid at position 942 is P, the amino acid at position 892 is P, the amino acid at position 614 is N and the amino acid at position 987 is P.

[0079] In another preferred embodiment, the SARS-COV-2 S proteins comprise a deletion of the furin cleavage site and the amino acid at position 944 is P, the amino acid at position 614 is G, the amino acid at position 572 is I, the amino acid at position 532 is P, and comprises a disulfide bridge between residues 880 and 888, and wherein the amino acid at position 987 is P.

[0080] In certain embodiments, the invention provides SARS-COV 2 proteins comprising an amino acid sequence selected from the group consisting of SEQ ID NO: 5-194 and SEQ ID NO: 197-418, SEQ ID NO: 420 and SEQ ID NO: 421, or fragments thereof. In a preferred embodiment, the SARS-COV 2 proteins comprise an amino acid sequence of SEQ ID NO: 417 or SEQ ID NO: 418. In certain embodiments, the proteins according to the invention do not comprise a signal peptide sequence or a tag sequence.

[0081] The term “fragment” as used herein refers to a peptide that has an amino-terminal and/or carboxy-terminal and/or internal deletion, but where the remaining amino acid sequence is identical to the corresponding positions in the sequence of a SARS-COV-2 S protein, for example, the full-length sequence of a SARS-COV-2 S protein. It will be appreciated that for inducing an immune response and in general for vaccination purposes, a protein needs not to be full length nor have all its wild type functions, and fragments of the protein are equally useful. A fragment according to the invention is an immunologically active fragment, and typically comprises at least 15 amino acids, or at least 30 amino acids, of the SARS-COV-2 S protein. In certain embodiments, it comprises at least 50, 75, 100, 150, 200, 250, 300, 350, 400, 450, 500, or 550 amino acids, of the SARS-COV-2 S protein. In certain documents, a fragment is the SARS-COV-2 S ectodomain.

[0082] In certain embodiments, the proteins according to the invention are soluble (trimeric) proteins, e.g. S protein ectodomains, and comprise a truncated S2 domain. As used herein a “truncated” S2 domain refers to a S2 domain that is not a full length S2 domain, i.e. wherein either N-terminally or C-terminally one or more amino acid residues have been deleted. According to the invention, at least the transmembrane domain and cytoplasmic domain are deleted (corresponding to the amino acids 1-1208 of SEQ ID NO: 1) to permit expression as a soluble ectodomain (corresponding to the amino acids 1-1208 of SEQ ID NO: 1). For the stabilization of such soluble trimeric SARS-COV-2 S protein in the pre-fusion conformation, a heterologous trimerization domain, such as a fibritin-based trimerization domain, may be fused to the C-terminus of the Corona virus S protein ectodomain. This fibritin domain or ‘Foldon’ is derived from T4 fibritin and was described earlier as an artificial natural trimerization domain (Letarov et al., (1993): S-Guthe et al., (2004)). Thus, in certain embodiments, the transmembrane region has been replaced by a heterologous trimerization domain. In a preferred embodiment, the heterologous trimerization domain is a foldon domain comprising the amino acid sequence of SEQ ID NO:4. However, it is to be understood that according to the invention other trimerization domains are also possible or no heterologous trimerization domain is added to the S ectodomain.

[0083] In a preferred embodiment, the soluble trimeric SARS-COV2 S proteins of the invention do not comprise a heterologous trimerization domain.

[0084] In preferred embodiments, the present invention provides recombinant SARS-COV-2 S proteins comprising a truncated S2 domain and comprising a deletion of the furin cleavage site and wherein the amino acid at position 942 is P, the amino acid at position 892 is P, the amino acid at position 987 is P, wherein the protein does not comprise a heterologous trimerization domain and wherein numbering of the amino acid positions is according to the numbering of the amino acid positions in SEQ ID NO: 1.

[0085] In preferred embodiments, the present invention provides recombinant SARS-COV-2 S proteins comprising a truncated S2 domain and comprising a deletion of the furin cleavage site and wherein the amino acid at position 942 is P, the amino acid at position 892 is P, the amino acid at position 614 is N or G, the amino acid at position 987 is P, wherein the protein does not comprise a heterologous trimerization domain and wherein numbering of the amino acid positions is according to the numbering of the amino acid positions in SEQ ID NO: 1.

[0086] The recombinant prefusion SARS-COV-2 S proteins according to the invention preferably have improved trimer yields and/or improved (thermal) stability.

[0087] Alternatively, or in addition, the prefusion SARS-COV-2 S proteins according to the invention induce increased titers of neutralizing antibodies, as compared to SARS-COV-2 S proteins without the stabilizing mutations of the invention.

[0088] In certain embodiment, the pre-fusion SARS-COV-2 S proteins according to the invention are stable, i.e. do not readily change into the post-fusion conformation upon processing of the proteins, such as e.g. upon purification, freeze-thaw cycles, and/or storage etc. In certain embodiments, the pre-fusion SARS-COV-2 S proteins have an increased stability as compared to SARS-COV-2 S proteins without the mutations of the invention, e.g. as indicated by an increased melting temperature (measured by e.g. differential scanning fluorimetry).

[0089] The proteins according to the invention may comprise a signal peptide, also referred to as signal sequence or leader peptide, corresponding to amino acids 1-13 of SEQ ID NO: 1. Signal peptides are short (typically 5-30 amino acids long) peptides present at the N-terminus of the majority of newly synthesized proteins that are destined towards the secretory pathway.

[0090] In certain embodiments, the proteins according to the invention do not comprise a signal peptide.

[0091] In certain embodiments, the proteins comprise a tag sequence, such as a HIS-Tag or C-Tag. A His-Tag (or polyhistidine-tag) is an amino acid motif in proteins that consists of at least five histidine (H) residues, preferably placed at the N- or C-terminus of the protein, which is generally used for purification purposes. Alternatively, other tags like a C-tag can be used for these purposes. In certain embodiments, the proteins according to the invention do not comprise a tag sequence.

[0092] The invention also provides methods for stabilizing a SARS-COV-2 S protein, said method comprising introducing in the amino acid sequence of a SARS-COV-2 S protein at least one mutation selected from the group consisting of a mutation of at least one amino acid in the loop region corresponding to amino acid residues 941-945 into P, a mutation of the amino acid at position 892, a mutation of the amino acid at position 614, a mutation at position 572, a mutation at position 532, a disulfide bridge between residues 880 and 888, and a disulfide bridge between residues 884 and 893, wherein the numbering of the amino acid positions is according to the numbering of the amino acid positions in SEQ ID NO: 1.

[0093] In certain embodiments, the methods comprise introducing at least two mutations comprising a mutation of at least one amino acid in the loop region corresponding to amino acid residues 941-945 into P, and a mutation selected from the group consisting of a mutation of the amino acid at position 892, a mutation of the amino acid at position 614, a mutation at position 572, a mutation at position 532, a disulfide bridge between residues 880 and 888 and a disulfide bridge between residues 884 and 893.

[0094] In certain embodiments, the methods comprise introducing at least two mutations comprising a mutation of at least one amino acid in the loop region corresponding to amino acid residues 941-945 into P, and a mutation selected from the group consisting of a mutation of the amino acid at position 892, a mutation of the amino acid at position 614, a mutation at position 572, a mutation at position 532, a disulfide bridge between residues 880 and 888 and a disulfide bridge between residues 884 and 893, provided that the proteins do not comprise both the disulfide bridge between residues 880 and 888 and the disulfide bridge between residues 884 and 893.

[0095] In certain embodiments, the at least one mutation in the loop region corresponding to amino acid residues 941-945 is a mutation of the amino acid at position 942 into P. Alternatively, or in addition, the at least one mutation in the loop region corresponding to amino acid residues 941-945 is a mutation of the amino acid at position 941 into P.

[0096] Alternatively, or in addition, the at least one mutation in the loop region corresponding to amino acid residues 941-945 is a mutation of the amino acid at position 944 into P.

[0097] Alternatively, or in addition, the mutation at position 892 is a mutation into P.

[0098] Alternatively, or in addition, the mutation at position 614 is a mutation into N or G.

[0099] Alternatively, or in addition, the mutation at position 532 is a mutation into P.

[0100] Alternatively, or in addition, the mutation at position 572 is a mutation into I.

[0101] Alternatively, or in addition, the methods further comprise deleting the furin cleavage site. Deleting the furin cleavage site may be achieved in any way known in the art.

[0102] In certain embodiments, the deletion of the furin cleavage site comprises introducing a mutation of the amino acid at position 682 into S and/or a mutation of the amino acid at position 685 into G.

[0103] Alternatively, or in addition, the methods further comprise introducing a mutation of the amino acids at position 986 and/or 987 into proline. In a preferred embodiment, the methods comprise introducing a mutation of the amino acid at position 987 into proline.

[0104] The present invention further provides nucleic acid molecules encoding the SARS-CoV-2 S proteins according to the invention. The term “nucleic acid molecule” as used in the present invention refers to a polymeric form of nucleotides (i.e. polynucleotides) and includes both DNA (e.g. cDNA, genomic DNA) and RNA, and synthetic forms and mixed polymers of the above.

[0105] In preferred embodiments, the nucleic acid molecules encoding the proteins according to the invention are codon-optimized for expression in mammalian cells, preferably human cells, or insect cells. Methods of codon-optimization are known and have been described previously (e.g. WO 96/09378 for mammalian cells). A sequence is considered codon-optimized if at least one non-preferred codon as compared to a wild type sequence is replaced by a codon that is more preferred. Herein, a non-preferred codon is a codon that is used less frequently in an organism than another codon coding for the same amino acid, and a codon that is more preferred is a codon that is used more frequently in an organism than a non-preferred codon. The frequency of codon usage for a specific organism can be found in codon frequency tables, such as in http://www.kazusa.or.jp/codon. Preferably more than one non-preferred codon, preferably most or all non-preferred codons, are replaced by codons that are more preferred. Preferably the most frequently used codons in an organism are used in a codon-optimized sequence. Replacement by preferred codons generally leads to higher expression.

[0106] It will be understood by a skilled person that numerous different polynucleotides and nucleic acid molecules can encode the same protein as a result of the degeneracy of the genetic code. It is also understood that skilled persons may, using routine techniques, make nucleotide substitutions that do not affect the protein sequence encoded by the nucleic acid molecules to reflect the codon usage of any particular host organism in which the proteins are to be expressed. Therefore, unless otherwise specified, a “nucleotide sequence encoding an amino acid sequence” includes all nucleotide sequences that are degenerate versions of each other and that encode the same amino acid sequence. Nucleotide sequences that encode proteins and RNA may or may not include introns.

[0107] Nucleic acid sequences can be cloned using routine molecular biology techniques, or generated de novo by DNA synthesis, which can be performed using routine procedures by service companies having business in the field of DNA synthesis and/or molecular cloning (e.g. GeneArt, GenScript, Invitrogen, Eurofins).

[0108] In certain embodiments, the nucleic acid sequences encode SARS-COV 2 proteins comprising an amino acid sequence selected from the group consisting of SEQ ID NO: 5-194 and SEQ ID NO: 197-418, SEQ ID NO: 420 and SEQ ID NO: 421, or fragments thereof.

[0109] In a preferred embodiment, the nucleic acid sequence encodes a SARS-COV 2 protein comprising an amino acid sequence of SEQ ID NO: 417 or SEQ ID NO: 418.

[0110] The invention also provides vectors comprising a nucleic acid molecule as described above. In certain embodiments, a nucleic acid molecule according to the invention thus is part of a vector. Such vectors can easily be manipulated by methods well known to the person skilled in the art and can for instance be designed for being capable of replication in prokaryotic and/or eukaryotic cells. In addition, many vectors can be used for transformation of eukaryotic cells and will integrate in whole or in part into the genome of such cells, resulting in stable host cells comprising the desired nucleic acid in their genome. The vector used can be any vector that is suitable for cloning DNA and that can be used for transcription of a nucleic acid of interest.

[0111] In certain embodiments of the invention, the vector is an adenovirus vector. An adenovirus according to the invention belongs to the family of the Adenoviridae, and preferably is one that belongs to the genus Mastadenovirus. It can be a human adenovirus, but also an adenovirus that infects other species, including but not limited to a bovine adenovirus (e.g. bovine adenovirus 3, BAdV3), a canine adenovirus (e.g. CAdV2), a porcine adenovirus (e.g. PAdV3 or 5), or a simian adenovirus (which includes a monkey adenovirus and an ape adenovirus, such as a chimpanzee adenovirus or a gorilla adenovirus). Preferably, the adenovirus is a human adenovirus (HAdV, or AdHu), or a simian adenovirus such as chimpanzee or gorilla adenovirus (ChAd, AdCh, or SAdV), or a rhesus monkey adenovirus (RhAd). In the invention, a human adenovirus is meant if referred to as Ad without indication of species, e.g. the brief notation “Ad26” means the same as HAdV26, which is human adenovirus serotype 26. Also as used herein, the notation “rAd” means recombinant adenovirus, e.g., “rAd26” refers to recombinant human adenovirus 26.

[0112] Most advanced studies have been performed using human adenoviruses, and human adenoviruses are preferred according to certain aspects of the invention. In certain preferred embodiments, a recombinant adenovirus according to the invention is based upon a human adenovirus. In preferred embodiments, the recombinant adenovirus is based upon a human adenovirus serotype 5, 11, 26, 34, 35, 48, 49, 50, 52, etc. According to a particularly preferred embodiment of the invention, an adenovirus is a human adenovirus of serotype 26. Advantages of these serotypes include a low seroprevalence and/or low pre-existing neutralizing antibody titers in the human population, and experience with use in human subjects in clinical trials.

[0113] Simian adenoviruses generally also have a low seroprevalence and/or low pre-existing neutralizing antibody titers in the human population, and a significant amount of work has been reported using chimpanzee adenovirus vectors (e.g. U.S. Pat. No. 6,083,716; WO 2005/071093; WO 2010/086189; WO 2010085984; Farina et al, 2001, J Virol 75: 11603-13; Cohen et al, 2002, J Gen Virol 83: 151-55: Kobinger et al, 2006, Virology 346: 394-401: Tatsis et al., 2007, Molecular Therapy 15: 608-17: see also review by Bangari and Mittal, 2006, Vaccine 24: 849-62; and review by Lasaro and Ertl, 2009, Mol Ther 17: 1333-39). Hence, in other embodiments, the recombinant adenovirus according to the invention is based upon a simian adenovirus, e.g. a chimpanzee adenovirus. In certain embodiments, the recombinant adenovirus is based upon simian adenovirus type 1, 7, 8, 21, 22, 23, 24, 25, 26, 27.1, 28.1, 29, 30, 31.1, 32, 33, 34, 35.1, 36, 37.2, 39, 40.1, 41.1, 42.1, 43, 44, 45, 46, 48, 49, 50 or SA7P. In certain embodiments, the recombinant adenovirus is based upon a chimpanzee adenovirus such as ChAdOx 1 (see e.g. WO 2012/172277), or ChAdOx 2 (see e.g. WO 2018/215766). In certain embodiments, the recombinant adenovirus is based upon a chimpanzee adenovirus such as BZ28 (see e.g. WO 2019/086466). In certain embodiments, the recombinant adenovirus is based upon a gorilla adenovirus such as BLY6 (see e.g. WO 2019/086456), or BZ1 (see e.g. WO 2019/086466).

[0114] Preferably, the adenovirus vector is a replication deficient recombinant viral vector, such as rAd26, rAd35, rAd48, rAd5HVR48, etc.

[0115] In a preferred embodiment of the invention, the adenoviral vectors comprise capsid proteins from rare serotypes, e.g. including Ad26. In the typical embodiment, the vector is an rAd26 virus. An “adenovirus capsid protein” refers to a protein on the capsid of an adenovirus (e.g., Ad26, Ad35, rAd48, rAd5HVR48 vectors) that is involved in determining the serotype and/or tropism of a particular adenovirus. Adenoviral capsid proteins typically include the fiber, penton and/or hexon proteins. As used herein a “capsid protein” for a particular adenovirus, such as an “Ad26 capsid protein” can be, for example, a chimeric capsid protein that includes at least a part of an Ad26 capsid protein. In certain embodiments, the capsid protein is an entire capsid protein of Ad26. In certain embodiments, the hexon, penton and fiber are of Ad26.

[0116] One of ordinary skill in the art will recognize that elements derived from multiple serotypes can be combined in a single recombinant adenovirus vector. Thus, a chimeric adenovirus that combines desirable properties from different serotypes can be produced. Thus, in some embodiments, a chimeric adenovirus of the invention could combine the absence of pre-existing immunity of a first serotype with characteristics such as temperature stability, assembly, anchoring, production yield, redirected or improved infection, stability of the DNA in the target cell, and the like. See for example WO 2006/040330 for chimeric adenovirus Ad5HVR48, that includes an Ad5 backbone having partial capsids from Ad48, and also e.g. WO 2019/086461 for chimeric adenoviruses Ad26HVRPtr1, Ad26HVRPtr12, and Ad26HVRPtr13, that include an Ad26 virus backbone having partial capsid proteins of Ptr1, Ptr12, and Ptr13, respectively)

[0117] In certain embodiments the recombinant adenovirus vector useful in the invention is derived mainly or entirely from Ad26 (i.e., the vector is rAd26). In some embodiments, the adenovirus is replication deficient, e.g., because it contains a deletion in the E1 region of the genome. For adenoviruses being derived from non-group C adenovirus, such as Ad26 or Ad35, it is typical to exchange the E4-orf6 coding sequence of the adenovirus with the E4-orf6 of an adenovirus of human subgroup C such as Ad5. This allows propagation of such adenoviruses in well-known complementing cell lines that express the E1 genes of Ad5, such as for example 293 cells, PER.C6 cells, and the like (see, e.g. Havenga, et al., 2006, J Gen Virol 87: 2135-43: WO 03/104467). However, such adenoviruses will not be capable of replicating in non-complementing cells that do not express the E1 genes of Ad5.

[0118] The preparation of recombinant adenoviral vectors is well known in the art. Preparation of rAd26 vectors is described, for example, in WO 2007/104792 and in Abbink et al., (2007) Virol 81(9): 4654-63. Exemplary genome sequences of Ad26 are found in GenBank Accession EF 153474 and in SEQ ID NO: 1 of WO 2007/104792. Examples of vectors useful for the invention for instance include those described in WO2012/082918, the disclosure of which is incorporated herein by reference in its entirety.

[0119] Typically, a vector useful in the invention is produced using a nucleic acid comprising the entire recombinant adenoviral genome (e.g., a plasmid, cosmid, or baculovirus vector). Thus, the invention also provides isolated nucleic acid molecules that encode the adenoviral vectors of the invention. The nucleic acid molecules of the invention can be in the form of RNA or in the form of DNA obtained by cloning or produced synthetically. The DNA can be double-stranded or single-stranded.

[0120] The adenovirus vectors useful in the invention are typically replication deficient. In these embodiments, the virus is rendered replication deficient by deletion or inactivation of regions critical to replication of the virus, such as the E1 region. The regions can be substantially deleted or inactivated by, for example, inserting a gene of interest, such as a gene encoding a SARS-COV-2 S protein (usually linked to a promoter) within the region. In some embodiments, the vectors of the invention can contain deletions in other regions, such as the E2, E3 or E4 regions, or insertions of heterologous genes linked to a promoter within one or more of these regions. For E2- and/or E4-mutated adenoviruses, generally E2- and/or E4-complementing cell lines are used to generate recombinant adenoviruses. Mutations in the E3 region of the adenovirus need not be complemented by the cell line, since E3 is not required for replication.

[0121] A packaging cell line is typically used to produce sufficient amounts of adenovirus vectors for use in the invention. A packaging cell is a cell that comprises those genes that have been deleted or inactivated in a replication deficient vector, thus allowing the virus to replicate in the cell. Suitable packaging cell lines for adenoviruses with a deletion in the E1 region include, for example, PER. C6, 911, 293, and E1 A549.

[0122] In a preferred embodiment of the invention, the vector is an adenovirus vector, and more preferably a rAd26 vector, most preferably a rAd26 vector with at least a deletion in the E1 region of the adenoviral genome, e.g. such as that described in Abbink, J Virol, 2007. 81(9): p. 4654-63, which is incorporated herein by reference. Typically, the nucleic acid sequence encoding the SARS-COV-2 S protein is cloned into the E1 and/or the E3 region of the adenoviral genome.

[0123] Host cells comprising the nucleic acid molecules encoding the pre-fusion SARS-COV-2 S proteins also form part of the invention. The pre-fusion SARS-COV-2 S proteins may be produced through recombinant DNA technology involving expression of the molecules in host cells, e.g. Chinese hamster ovary (CHO) cells, tumor cell lines, BHK cells, human cell lines such as HEK293 cells, PER. C6 cells, or yeast, fungi, insect cells, and the like, or transgenic animals or plants. In certain embodiments, the cells are from a multicellular organism, in certain embodiments they are of vertebrate or invertebrate origin. In certain embodiments, the cells are mammalian cells, such as human cells, or insect cells. In general, the production of a recombinant proteins, such the pre-fusion SARS-COV-2 S proteins of the invention, in a host cell comprises the introduction of a heterologous nucleic acid molecule encoding the protein in expressible format into the host cell, culturing the cells under conditions conducive to expression of the nucleic acid molecule and allowing expression of the protein in said cell. The nucleic acid molecule encoding a protein in expressible format may be in the form of an expression cassette, and usually requires sequences capable of bringing about expression of the nucleic acid, such as enhancer(s), promoter, polyadenylation signal, and the like. The person skilled in the art is aware that various promoters can be used to obtain expression of a gene in host cells. Promoters can be constitutive or regulated, and can be obtained from various sources, including viruses, prokaryotic, or eukaryotic sources, or artificially designed.

[0124] Cell culture media are available from various vendors, and a suitable medium can be routinely chosen for a host cell to express the protein of interest, here the pre-fusion SARS-CoV-2 S proteins. The suitable medium may or may not contain serum.

[0125] A “heterologous nucleic acid molecule” (also referred to herein as ‘transgene’) is a nucleic acid molecule that is not naturally present in the host cell. It is introduced into for instance a vector by standard molecular biology techniques. A transgene is generally operably linked to expression control sequences. This can for instance be done by placing the nucleic acid encoding the transgene(s) under the control of a promoter. Further regulatory sequences may be added. Many promoters can be used for expression of a transgene(s), and are known to the skilled person, e.g. these may comprise viral, mammalian, synthetic promoters, and the like. A non-limiting example of a suitable promoter for obtaining expression in eukaryotic cells is a CMV-promoter (U.S. Pat. No. 5,385,839), e.g. the CMV immediate early promoter, for instance comprising nt. −735 to +95 from the CMV immediate early gene enhancer/promoter. A polyadenylation signal, for example the bovine growth hormone poly A signal (U.S. Pat. No. 5,122,458), may be present behind the transgene(s). Alternatively, several widely used expression vectors are available in the art and from commercial sources, e.g. the pcDNA and pEF vector series of Invitrogen, pMSCV and pTK-Hyg from BD Sciences, pCMV-Script from Stratagene, etc, which can be used to recombinantly express the protein of interest, or to obtain suitable promoters and/or transcription terminator sequences, polyA sequences, and the like.

[0126] The cell culture can be any type of cell culture, including adherent cell culture, e.g. cells attached to the surface of a culture vessel or to microcarriers, as well as suspension culture. Most large-scale suspension cultures are operated as batch or fed-batch processes because they are the most straightforward to operate and scale up. Nowadays, continuous processes based on perfusion principles are becoming more common and are also suitable. Suitable culture media are also well known to the skilled person and can generally be obtained from commercial sources in large quantities, or custom-made according to standard protocols. Culturing can be done for instance in dishes, roller bottles or in bioreactors, using batch, fed-batch, continuous systems and the like. Suitable conditions for culturing cells are known (see e.g. Tissue Culture, Academic Press, Kruse and Paterson, editors (1973), and R.I. Freshney, Culture of animal cells: A manual of basic technique, fourth edition (Wiley-Liss Inc., 2000, ISBN 0-471-34889-9)).

[0127] The invention further provides compositions comprising a pre-fusion SARS-COV-2 S protein and/or a nucleic acid molecule, and/or a vector, as described above. The invention also provides compositions comprising a nucleic acid molecule and/or a vector, encoding such pre-fusion SARS-COV-2 S protein. The invention further provides immunogenic compositions comprising a pre-fusion SARS-COV-2 S protein, and/or a nucleic acid molecule, and/or a vector, as described above. The invention also provides the use of a stabilized pre-fusion SARS-COV-2 S protein, a nucleic acid molecule, and/or a vector, according to the invention, for inducing an immune response against a SARS-COV-2 S protein in a subject. Further provided are methods for inducing an immune response against SARS-COV-2 S protein in a subject, comprising administering to the subject a pre-fusion SARS-COV-2 S protein, and/or a nucleic acid molecule, and/or a vector according to the invention. Also provided are pre-fusion SARS-COV-2 S proteins, nucleic acid molecules, and/or vectors, according to the invention for use in inducing an immune response against SARS-COV-2 S protein in a subject. Further provided is the use of the pre-fusion SARS-CoV-2 S proteins, and/or nucleic acid molecules, and/or vectors according to the invention for the manufacture of a medicament for use in inducing an immune response against SARS-CoV-2 S protein in a subject. In certain embodiments, the nucleic acid molecule is DNA and/or an RNA molecule.

[0128] The pre-fusion SARS-COV-2 S proteins, nucleic acid molecules, or vectors of the invention may be used for prevention (prophylaxis, including post-exposure prophylaxis) of SARS-COV-2 infections.

[0129] As used herein SARS-COV-2 may refer to the Wuhan-Hu-1 strain as originally identified in 2019 in Wuhan, or to variants thereof, e.g. variants comprising one or more mutations in the S protein, including but not limited to the B.1, B1.1.7, B.1.351, P1, B. 1.427, B.1.429, B.1.526, B.1.526.1, B.1.525, B.1.617, B.1.617.1, B. 1.617.2, B.1.617.3, and P.2 virus variants.

[0130] In certain embodiments, the prevention may be targeted at patient groups that are susceptible for and/or at risk of SARS-COV-2 infection or have been diagnosed with a SARS-CoV-2 infection. Such target groups include, but are not limited to e.g., the elderly (e.g. ≥50 years old, ≥60 years old, and preferably ≥65 years old), hospitalized patients and patients who have been treated with an antiviral compound but have shown an inadequate antiviral response. In certain embodiments, the target population comprises human subjects from 2 months of age.

[0131] The pre-fusion SARS-COV-2 S proteins, nucleic acid molecules and/or vectors according to the invention may be used e.g. in stand-alone treatment and/or prophylaxis of a disease or condition caused by SARS-COV-2, or in combination with other prophylactic and/or therapeutic treatments, such as (existing or future) vaccines, antiviral agents and/or monoclonal antibodies.

[0132] The invention further provides methods for preventing and/or treating SARS-COV-2 infection in a subject utilizing the pre-fusion SARS-COV-2 S proteins, nucleic acid molecules and/or vectors according to the invention. In a specific embodiment, a method for preventing and/or treating SARS-COV-2 infection in a subject comprises administering to a subject in need thereof an effective amount of a pre-fusion SARS-COV-2 S protein, nucleic acid molecule and/or a vector, as described above. A therapeutically effective amount refers to an amount of a protein, nucleic acid molecule or vector, that is effective for preventing, ameliorating and/or treating a disease or condition resulting from infection by SARS-COV-2. Prevention encompasses inhibiting or reducing the spread of SARS-COV-2 or inhibiting or reducing the onset, development or progression of one or more of the symptoms associated with infection by SARS-COV-2. Amelioration as used in herein may refer to the reduction of visible or perceptible disease symptoms, viremia, or any other measurable manifestation of SARS-COV-2 infection.

[0133] For administering to subjects, such as humans, the invention may employ pharmaceutical compositions comprising a pre-fusion SARS-COV-2 S protein, a nucleic acid molecule and/or a vector as described herein, and a pharmaceutically acceptable carrier or excipient. In the present context, the term “pharmaceutically acceptable” means that the carrier or excipient, at the dosages and concentrations employed, will not cause any unwanted or harmful effects in the subjects to which they are administered. Such pharmaceutically acceptable carriers and excipients are well known in the art (see Remington's Pharmaceutical Sciences, 18th edition, A. R. Gennaro, Ed., Mack Publishing Company [1990]: Pharmaceutical Formulation Development of Peptides and Proteins, S. Frokjaer and L. Hovgaard, Eds., Taylor & Francis [2000]; and Handbook of Pharmaceutical Excipients, 3rd edition, A. Kibbe, Ed., Pharmaceutical Press [2000]). The CoV S proteins, or nucleic acid molecules, preferably are formulated and administered as a sterile solution although it may also be possible to utilize lyophilized preparations. Sterile solutions are prepared by sterile filtration or by other methods known per se in the art. The solutions are then lyophilized or filled into pharmaceutical dosage containers. The pH of the solution generally is in the range of pH 3.0 to 9.5, e.g. pH 5.0 to 7.5. The CoV S proteins typically are in a solution having a suitable pharmaceutically acceptable buffer, and the composition may also contain a salt. Optionally stabilizing agent may be present, such as albumin. In certain embodiments, detergent is added. In certain embodiments, the CoV S proteins may be formulated into an injectable preparation.

[0134] In certain embodiments, a composition according to the invention further comprises one or more adjuvants. Adjuvants are known in the art to further increase the immune response to an applied antigenic determinant. The terms “adjuvant” and “immune stimulant” are used interchangeably herein and are defined as one or more substances that cause stimulation of the immune system. In this context, an adjuvant is used to enhance an immune response to the SARS-COV-2 S proteins of the invention. Examples of suitable adjuvants include aluminium salts such as aluminium hydroxide and/or aluminium phosphate: oil-emulsion compositions (or oil-in-water compositions), including squalene-water emulsions, such as MF59 (see e.g. WO 90/14837): saponin formulations, such as for example QS21 and Immunostimulating Complexes (ISCOMS) (see e.g. U.S. Pat. No. 5,057,540; WO 90/03184, WO 96/11711, WO 2004/004762, WO 2005/002620); bacterial or microbial derivatives, examples of which are monophosphoryl lipid A (MPL), 3-O-deacylated MPL (3dMPL), CpG-motif containing oligonucleotides, ADP-ribosylating bacterial toxins or mutants thereof, such as E. coli heat labile enterotoxin LT, cholera toxin CT, and the like: eukaryotic proteins (e.g. antibodies or fragments thereof (e.g. directed against the antigen itself or CD1a, CD3, CD7, CD80) and ligands to receptors (e.g. CD40L, GMCSF, GCSF, etc), which stimulate immune response upon interaction with recipient cells. In certain embodiments the compositions of the invention comprise aluminium as an adjuvant, e.g. in the form of aluminium hydroxide, aluminium phosphate, aluminium potassium phosphate, or combinations thereof, in concentrations of 0.05-5 mg, e.g. from 0.075-1.0 mg, of aluminium content per dose.

[0135] The pre-fusion SARS-COV-2 S proteins may also be administered in combination with or conjugated to nanoparticles, such as e.g. polymers, liposomes, virosomes, virus-like particles. The SARS-COV-2 S proteins may be combined with or encapsidated in or conjugated to the nanoparticles with or without adjuvant. Encapsulation within liposomes is described, e.g. in U.S. Pat. No. 4,235,877. Conjugation to macromolecules is disclosed, for example in U.S. Pat. No. 4,372,945 or U.S. Pat. No. 4,474,757.

[0136] In other embodiments, the compositions do not comprise adjuvants.

[0137] In certain embodiments, the invention provides methods for making a vaccine against a SARS-COV-2 virus, comprising providing a composition according to the invention and formulating it into a pharmaceutically acceptable composition. The term “vaccine” refers to an agent or composition containing an active component effective to induce a certain degree of immunity in a subject against a certain pathogen or disease, which will result in at least a decrease (up to complete absence) of the severity, duration or other manifestation of symptoms associated with infection by the pathogen or the disease. In the present invention, the vaccine comprises an effective amount of a pre-fusion SARS-COV-2 S protein and/or a nucleic acid molecule encoding a pre-fusion SARS-COV-2 S protein, and/or a vector comprising said nucleic acid molecule, which results in an immune response against the S protein of SARS-COV-2. This provides a method of preventing serious lower respiratory tract disease leading to hospitalization and the decrease in frequency of complications such as pneumonia and bronchiolitis due to SARS-COV-2 infection and replication in a subject. The term “vaccine” according to the invention implies that it is a pharmaceutical composition, and thus typically includes a pharmaceutically acceptable diluent, carrier or excipient. It may or may not comprise further active ingredients. In certain embodiments it may be a combination vaccine that further comprises additional components that induce an immune response against SARS-COV-2, e.g. against other antigenic proteins of SARS-COV-2, or may comprise different forms of the same antigenic component. A combination product may also comprise immunogenic components against other infectious agents, e.g. other respiratory viruses including but not limited to influenza virus or RSV. The administration of the additional active components may for instance be done by separate, e.g. concurrent administration, or in a prime-boost setting, or by administering combination products of the vaccines of the invention and the additional active components.

[0138] Compositions may be administered to a subject, e.g. a human subject. The total dose of the SARS-COV-2 S proteins in a composition for a single administration can for instance be about 0.01 μg to about 10 mg, e.g. 1 μg-1 mg, e.g. 10 μg-100 μg. Determining the recommended dose will be carried out by experimentation and is routine for those skilled in the art.

[0139] Administration of the compositions according to the invention can be performed using standard routes of administration. Non-limiting embodiments include parenteral administration, such as intradermal, intramuscular, subcutaneous, transcutaneous, or mucosal administration, e.g. intranasal, oral, and the like. In one embodiment a composition is administered by intramuscular injection. The skilled person knows the various possibilities to administer a composition, e.g. a vaccine in order to induce an immune response to the antigen(s) in the vaccine.

[0140] A subject as used herein preferably is a mammal, for instance a rodent, e.g. a mouse, a cotton rat, or a non-human-primate, or a human. Preferably, the subject is a human subject.

[0141] The proteins, nucleic acid molecules, vectors, and/or compositions may also be administered, either as prime, or as boost, in a homologous or heterologous prime-boost regimen. If a boosting vaccination is performed, typically, such a boosting vaccination will be administered to the same subject at a time between one week and one year, preferably between two weeks and four months, after administering the composition to the subject for the first time (which is in such cases referred to as ‘priming vaccination’). In certain embodiments, the administration comprises at least one prime and at least one booster administration.

[0142] The invention further provides a host cell comprising the isolated nucleic acid molecule or vector encoding the recombinant SARS-COV-2 S protein of the invention. Such host cells can be used for recombinant protein production, recombinant protein expression, or the production of viral particles.

[0143] In addition, the invention relates to methods of producing a recombinant SARS-COV-2 S protein, comprising growing a host cell comprising an isolated nucleic acid molecule or vector encoding the recombinant SARS-COV-2 S protein of the invention under conditions suitable for production of the recombinant SARS-COV-2 S protein.

[0144] The SARS-COV-2 S proteins of the invention may also be used to isolate monoclonal antibodies from a biological sample, e.g. a biological sample (such as blood, plasma, or cells) obtained from an immunized animal or infected human. The invention thus also relates to the use of the SARS-COV-2 protein as bait for isolating monoclonal antibodies.

[0145] Also provided is the use of the pre-fusion SARS-COV-2 S proteins of the invention in methods of screening for candidate SARS-COV-2 antiviral agents, including but not limited to antibodies against SARS-COV-2

[0146] In addition, the proteins of the invention may be used as diagnostic tool, for example to test the immune status of an individual by establishing whether there are antibodies in the serum of such individual capable of binding to the protein of the invention. The invention thus also relates to an in vitro diagnostic method for detecting the presence of an ongoing or past CoV infection in a subject said method comprising the steps of a) contacting a biological sample obtained from said subject with a protein according to the invention; and b) detecting the presence of antibody-protein complexes.

### EXAMPLES

### Example 1: Instability of Semi-Stabilized SARS-COV2 S Protein

[0147] A plasmid corresponding to the semi-stabilized SARS-COV2 S protein described by (Wrapp et. al., Science 2020, FurinKO+PP according to SEQ ID NO: 3) was synthesized and codon-optimized at Gene Art (Life Technologies, Carlsbad, CA). A variant with a HIS tag (based on SEQ ID NO: 3) and a variant with a C-tag were purified. The constructs were cloned into pCDNA2004 or generated by standard methods widely known within the field involving site-directed mutagenesis and PCR and sequenced. The expression platform used was the Expi293F cells. The cells were transiently transfected using ExpiFectamine (Life Technologies) according to the manufacturer's instructions and cultured for 6 days at 37° C. and 10% CO₂. The culture supernatant was harvested and spun for 5 minutes at 300 g to remove cells and cellular debris. The spun supernatant was subsequently sterile filtered using a 0.22 um vacuum filter and stored at 4ºC until use.

[0148] SARS-COV2 S trimers were purified using a two-step purification protocol including either CaptureSelect™ C-tag affinity column for C-tagged protein, or, for HIS-tagged protein, by complete His-tag 5 mL (Roche). Both proteins were further purified by size-exclusion chromatography using a HiLoad Superdex 200 16/600 column (GE Healthcare). The C-tagged and HIS tagged S trimer was unstable after repeated freeze/thaw cycles (FIG. 2 A, B). The purified HIS-tagged S trimer and the C-tagged trimer showed decay after 1 and especially after 5 flash freezing cycles using liquid Nitrogen (FIG. 2. A, B).

### Example 2: Stabilizing Mutations Analyzed with AlphaLISA and Analytical SEC

[0149] In order to stabilize the labile pre-fusion conformation of SARS-COV2 S protein, amino acid residues at position 614, 892 and 942 (numbering according to SEQ ID NO: 1) were mutated. Plasmids coding for the recombinant SARS-COV-2 S protein ectodomains which were C-terminally fused to a foldon (SEQ ID NO: 4) were expressed in Expi293Fcells, and 3 days after transfection the supernatants were tested for binding to ACE2-Fc using AlphaLISA (FIG. 3).

[0150] For the AlphaLISA assay, SARS-COV2 S variants in the pcDNA2004 vector containing a linker followed by a sortase A tag followed by a Flag-tag followed by a flexible (G₄S)₇ linker and ending with a His-tag, were prepared (the sequence of the tag, which was placed at the C-terminus of the S protein, is provided in SEQ ID NO: 2). Three days after transfection, crude supernatants were diluted 300 times in AlphaLISA buffer (PBS+0.05% Tween-20+0.5 mg/mL BSA). Then, 10 μL of each dilution were transferred to a 96-well plate and mixed with 40 μL acceptor beads, donor beads and ACE2-Fc. The donor beads were conjugated to ProtA (Cat #: AS102M, Perkin Elmer), which binds to ACE2Fc. The acceptor beads were conjugated to an anti-His antibody (Cat #: AL128M, Perkin Elmer), which binds to the His-tag of the construct.

[0151] The mixture of the supernatant containing the expressed S protein, the ACE-2-Fc, donor beads, and acceptor beads was incubated at room temperature for 2 hours without shaking. Subsequently, the chemiluminescent signal was measured with an Ensight plate reader instrument (Perkin Elmer). The average background signal attributed to mock transfected cells was subtracted from the AlphaLISA counts measured for each of the SARS-CoV-2 S variants. Subsequently, the whole data set was divided by signal measured for the SARS-COV-2 S protein having the S backbone sequence signal to normalize the signal for each of the S variants tested to the backbone.

[0152] Compared with the soluble uncleaved S variant with a C-terminal foldon domain (SEQ ID NO: 2) or the variant with the additional PP (SEQ ID NO:3), the S variants with stabilizing substitutions D614N, A892P and A942P showed higher ACE2-Fc binding (FIG. 3).

[0153] The cell culture supernatants of transfections with a semi-stable uncleaved SARS-CoV-2 S+PP design and with a labile uncleaved SARS-COV-2 S protein, and of variants with a single point mutation as described above (D614N, A892P and A942P) were analyzed using analytical SEC (FIG. 4). An ultra high-performance liquid chromatography system (Vanquish, Thermo Scientific) and μDAWN TREOS instrument (Wyatt) coupled to an Optilab uT-rEX Refractive Index Detector (Wyatt), in combination with an in-line Nanostar DLS reader (Wyatt), was used for performing the analytical SEC experiment. The cleared crude cell culture supernatants were applied to a SRT-10C SEC-500 15 cm column, (Sepax Cat #235500-4615) with the corresponding guard column (Sepax) equilibrated in running buffer (150 mM sodium phosphate, 50 mM NaCl, pH 7.0) at 0.35 mL/min. When analyzing supernatant samples, μMALS detectors were offline and analytical SEC data was analyzed using Chromeleon 7.2.8.0 software package. The signal of supernatants of non-transfected cells was subtracted from the signal of supernatants of S transfected cells. When purified proteins were analyzed using SEC-MALS, mMALS detectors were inline and data was analyzed using Astra 7.3 software package. For the protein component, a dn/dc (mL/g) value of 0.1850 was used and for the glycan component a value of 0.1410. Compared with the semi-stable soluble uncleaved S variant with a C-terminal foldon domain+PP, the variants with additional stabilizing substitutions D614N, A892P and especially A942P showed higher trimer content according to analytical SEC of culture supernatant (FIG. 4A-C). Similarly, compared with the soluble uncleaved S variant with a C-terminal foldon domain, variants with stabilizing substitutions D614N, A892P and especially A942P showed higher trimer content according to analytical SEC of culture supernatant. The A942P mutation has a stronger effect on trimer expression than the published double proline mutation in the hinge loop, reflecting higher stability during synthesis and transport (compare dashed line of FIG. 4B with solid line of FIG. 4 E). SEC-MALS analysis was performed on the purified stabilized protein according to SEQ ID NO: 5 and showed that the peak at 5 minutes corresponds to the mass of a trimeric S protein (FIG. 4 G).

### Example 3: Stabilizing Point Mutations and Disulfide Bridges Analyzed with AlphaLISA and Analytical SEC

[0154] In order to stabilize the labile pre-fusion conformation of SARS-COV-2 S protein, disulfide bridges were introduced between residues 880 and 888 or between residues 884 and 893, and point mutations were introduced at position 532 and 572. Similar to EXAMPLE 2, plasmids coding for the uncleaved SARS-COV-2 S protein with or without the double proline in the hinge loop were expressed in Expi293Fcells, and 3 days after transfection the supernatants were tested for binding to ACE2-Fc using AlphaLISA as described in EXAMPLE 2 (FIG. 5).

[0155] Compared with the soluble labile uncleaved S variant with a C-terminal foldon, the variants with stabilizing substitutions T572I, N532P and with the introduction of a disulfide between residues 880 and 888 showed higher ACE2-Fc binding (FIG. 5, left panel).

[0156] In addition, compared with the soluble semi stable uncleaved S variant with a C-terminal foldon domain and the double proline, the variants with stabilizing substitutions T572I, N532P, with the introduction of a disulfide between residues 880 and 888 and with a disulfide between residues 884 and 893 showed higher ACE2-Fc binding (FIG. 5, right panel).

[0157] The cell culture supernatants of transfections with a semi stable uncleaved SARS-CoV-2 S+PP design and with a labile uncleaved SARS-COV-2 S protein, and of variants with an introduced disulfide bridge or a single point mutation as described above (T572I, N532P, CYS880-CYS888 and CYS884-CYS893) were analyzed using analytical SEC (FIG. 6) as described in EXAMPLE 2. Compared with the semi-stable soluble uncleaved S variant with a C-terminal foldon domain+PP, the variants with stabilizing substitutions T572I, N532P and the disulfide bridges 880C-888C and 884C-893C (FIG. 6A-D) showed higher trimer content according to analytical SEC of culture supernatant. Similarly, compared with the soluble uncleaved S variant, the variants with stabilizing substitutions T572I, N532P and the variant with disulfide bridge 880C-888C showed higher trimer content according to analytical SEC of culture supernatant (FIG. 6 E-H).

### Example 4: Stabilizing Point Mutations Analyzed with AlphaLISA and Analytical SEC

[0158] In order to stabilize the labile pre-fusion conformation of SARS-COV-2 S protein, point mutations were introduced at position 941 and 944. Similar to EXAMPLE 2, plasmids coding for the labile uncleaved SARS-COV-2 S protein were expressed in Expi293Fcells, and 3 days after transfection the supernatants were tested for binding to ACE2-Fc using AlphaLISA as described in EXAMPLE 2 (FIG. 7A).

[0159] Compared with the soluble labile uncleaved S variant with a C-terminal foldon, the variants with additional stabilizing substitutions T941P and A944P showed higher ACE2-Fc binding (FIG. 7A).

[0160] The cell culture supernatants of transfections with a labile uncleaved SARS-COV-2 S protein, and of variants with a single point mutation as described above (T941P and A944P) were analyzed using analytical SEC (FIG. 7B) as described in EXAMPLE 2. Compared with the labile soluble uncleaved S variant with a C-terminal foldon domain, the variants with stabilizing substitutions T941P and A944P (FIG. 7B) showed higher trimer content according to analytical SEC of culture supernatant.

### Example 5: Differential Scanning Calorimetry (DSC)

[0161] Melting temperatures for S trimers were determined using MicroCal capillary DSC system. 400 μL of 0.5 mg/mL protein sample was used per measurement. The measurement was performed with a start temperature of 20° C. and a final temperature of 110° C. The scan rate 100° C./h and the feedback mode: Low (=signal amplification). The data were analyzed using the Origin J. Software (MicroCal VP-analysis tool). The purified uncleaved S trimer (SEQ ID NO: 2) showed a wide range of melting events with a major melting event (Tm2) at 64ºC (FIG. 8, top panel). Introduction of the mutation K986P drastically destabilized the trimer since most of the trimer melted at 48° C. The mutation V987P had relatively little impact as the major melting event (Tm2) happened at 64° C. and the double proline mutation (K986P+V987P) showed a slight increase of the melting event at 47° C. (FIG. 8, top panel). The middle panel shows DSC thermostability data of the uncleaved semistable S trimer (Furin KO+PP, SEQ ID NO: 3, dashed line) with additional indicated point mutation in the S1 domain. N532P had no effect on the Tm and T572I and D614N showed a strong stabilizing effect (middle panel). The bottom panel shows DSC thermostability data of the uncleaved semistable S trimer (SEQ ID NO: 3, dashed line) with additional indicated mutations in the S2 domain. A942P had no effect on the Tm and A892P and disulfide F88C-G880C showed a strong stabilizing effect (bottom panel).

### Example 6: S Protein Fusogenicity

[0162] A cell-cell fusion assay to mimic the entry pathway of SARS-COV-2 at the plasma membrane was developed by transiently co-expressing GFP, ACE2, TMPRSS2 and full-length S variants in HEK293 cells (see FIG. 9). After 18-24 hr, cell monolayers were visualized using an EVOS microscope. All identified stabilizing mutations were tested, as well as furin KO, and the double proline mutations. The assay was performed at a saturating concentration of the S protein to obtain yes or no answers regarding fusion competence. Whereas the furin KO, the PP mutations and the two cystines completely abolished fusogenicity, the individual point mutants still allowed fusion to occur. This implies that these variants are folded correctly and are functional.

### Example 7: Combination of Stabilizing Mutations Analyzed with Analytical SEC and AlphaLISA

[0163] In order to stabilize the labile pre-fusion conformation of SARS-COV-2 S protein, a combination of indicated stabilizing point mutations from previous examples were introduced in SEQ ID NO:2 (FIG. 10). Similar to EXAMPLE 2, plasmids coding for the labile uncleaved SARS-COV-2 S protein (dashed line) and stabilized variants were expressed in Expi293Fcells, and 3 days after transfection the supernatants were analyzed for trimer content by analytical SEC as described in EXAMPLE 2. As shown in FIG. 10A, the variant with the four mutations A892P, A942P, D614N and V987P showed the highest trimer content which was much higher than the semistabilized S protein based on SEQ ID NO:3 (Furin KO+PP). FIG. 10B shows that the trimers in the cell culture supernatants also showed higher ACE2-Fc binding using AlphaLISA as described in EXAMPLE 2 (FIG. 10 B).

[0164] In order to obtain soluble native S trimers, a C-terminal heterologous trimerization domain was added as described by Pallesen et al. (Pallesen, PNAS, 2017). To investigate whether the point mutations sufficiently stabilized the protein to trimerize without the addition of a trimerization domain, a variant was made with four stabilizing mutations without the foldon (DF) (A892P-A942P-D614N-V987P-DF). As shown in FIG. 10 C and table 2, a large trimer peak was detected in analytical SEC at approximately 5.3 minutes. A slight shift to longer retention time was observed due to the lower molecular weight. The molecular weight was confirmed by MALS detection (Table 2). Subsequently, thermostability of the variants with combinations of stabilizing mutations was tested by DSC (D). Uncleaved S variants as indicated in panel D were compared with the semistabilized uncleaved variant with the double proline at position 986 and 987 (SEQ ID NO: 3, dashed line). Variants with 4 or 5 mutations with or without foldon all showed a single Tm at 66° C.

### Example 8: Freeze-Thaw Stability of SARS-2 S Variants

[0165] Purified SARS-2 S trimers with indicated mutations (FIG. 11, Table 3) were tested for freeze-thaw (F/T) stability using analytical SEC to measure the remaining amount of trimer after each F/T step. Proteins were diluted to 0.32 mg/ml in a Tris buffer without cryoprotective excipients (20 mM Tris, 150 mM NaCl, pH7.4) and snap frozen using liquid Nitrogen and thawed once (1×) or repeatedly (3×, 5×). The semistabilized variant with the K986P+V987P was almost completely lost after 3 times F/T but the stabilized variants survived these conditions much better (FIG. 11, Table 3).

### Example 9: Antigenicity of Stabilized SARS-2 S Variants

[0166] RBD exposure was characterized by ACE2, by neutralizing antibody SAD-S35 and non-neutralizing antibody CR3022 (Yuan et al., (2020) that compete with ACE2. ACE2 and SAD-S35 can only bind RBD in the up configuration and CR3022 can only bind when 2 RBDs are in the up configuration (FIG. 12A). The variant with K986P shows higher binding of SAD-S35, ACE2 and CR3022 than Furin KO+PP (SEQ ID NO: 3), which agrees with the results obtained with SEC and AlphaLISA in supernatants, indicating that it causes more RBD exposure and thus more opening of the trimer. D614N and T572I show very low binding to SAD-S35 and ACE2 compared to S-2P and almost no CR3022 binding, indicating more closed trimers with some 1-up configurations, but hardly any 2-up or 3-up RBD up configurations. A892P improved trimer closure compared to control to a lesser extent, while A942 seemed to increase its opening. These mutants likely exhibit a mixture of closed, 1-up and 2-up structures (FIG. 12B) When the stabilizing mutations are combined, lower binding is shown for ACE2-Fc and the antibodies compared to FurinKO+PP (SEQ ID NO:3) indicating that the trimer is mostly in the closed conformation (FIG. 12C). Next, storage stability at 4 degrees was tested for FurinKO+PP compared with stabilized variant (A892P-A942P-D614N-V987P-DF) using BioLayer Interferometry at endpoint equilibrium. ACE2-Fc binding and CR3022 binding were comparable with freshly purified material indicating that the stabilized protein was still in the closed conformation. The strongly neutralizing monoclonal antibody S309 that binds RBD in the closed conformation shows binding with both proteins (Pinto et. al., 2020) (FIG. 12D). The differential binding of CR3022 and S309 to the stabilized foldon-less S trimer indicates a well folded RBD in the down configuration.

### Example 10: A942P Increases S Expression of FL S

[0167] Different full length (FL) S proteins were produced in Expi292F cells. COR200660 (660) has a furin knock out mutation, i.e a mutation of the amino acid at position 682 into S and/or a mutation of the amino acid at position 685 into G. COR200662 (662) is the same as 660, but with an additional A942P substitution. COR200007 (007) has furin knock out mutation and additional mutations K986P and V987P. COR200664 is the same as 007, but with an additional A942P substitution.

[0168] Higher amounts of spikes detected in the supernatant when A942P is present compared with when it is not present (as shown in FIG. 13), indicate that A942P increases the expression of full-length (FL) S protein, whereas the amount of beta actin of the cell itself is not changed by the A942P substitution. Applying whole cell lysates on SDS-PAGE followed by Western blotting, shows that A942P increases the expression of full length S protein by a factor ˜1.4 (data not shown).

### Example 11: Antigenicity of Membrane Bound S with Stabilizing Substitutions

[0169] The antigenicity of the seven membrane bound S proteins encoded by the different DNA constructs was evaluated in cell-based ELISA (CBE) as described below. Binding was assessed to three neutralizing ligands, i.e. angiotensin-converting enzyme 2 (ACE2-Fc) (Liu et al. (2017)), and two monoclonal antibodies (mAbs), COVA1-22 and COVA2-15 (Brouwer et al., 2020) and two non-neutralizing mAbs, i.e. CR3015 (van den Brink et al., (2005)) and CR3046 (Bos et al., (2020)). The D614N (like D614G), A892P and T572I substitutions decrease the binding of CR3015 and CR3046 compared to the wild type spike in the membrane suggesting that these substitutions stabilize the spike. A892P and T572I decrease binding of CR3015 and CR3046 with or without D614G (FIG. 14).

### Cell-Based ELISA Method

[0170] HEK293 cells were seeded at 2×10⁵ cells/mL in appropriate medium in a flat-bottomed 96-well microtiter plate (Corning). The plate was incubated overnight at 37° C. in 10% CO2. After 24 h, transfection of the cells was performed with 300 ng DNA per well and the plate was incubated for 48 h at 37° C. in 5% CO2. Two days post transfection, cells were washed with 100 μl/well of blocking buffer containing 1% (w/v) BSA (Sigma), 1 mM MgCl2, 1.8 mM CaCl2, and 5 mM Tris pH 8.0 in 1×PBS (GIBCO). After washing, nonspecific binding was blocked, using 100 μl/well of blocking solution for 20 min at 4° C. Subsequently, cells were incubated in 50 μl/well blocking buffer containing 1 μg/ml primary antibodies ACE2-Fc, COVA1-22, COVA2-15, CR3015 and CR3046 for 1 hr at 4° C. The plate was washed three times with 100 μl/well of the blocking buffer, three times with 100 μl/well of washing buffer containing 1 mM MgCl2, 1.8 mM CaCl2 in 1×PBS and then incubated with 100 μl/well of the blocking buffer for 5 min at 4° C. After blocking, the cells were incubated with 50 μl/well of secondary antibodies HRP conjugated Mouse Anti-Human IgG (Jackson, 1:2500) or HRP Conjugated goat anti-mouse IgG (Jackson, 1:2500) then incubated 40 min at 4° C. The plate was washed three times with 100 μl/well of the blocking buffer, three times with 100 μl/well washing buffer. 30 μl/well of BM Chemiluminescence ELISA substrate (Roche, 1:50) was added to the plate, and the luminosity was immediately measured using the Ensight Plate Reader.

### Example 12: In Vitro Antigenicity of Three Soluble Proteins Tested for Immunogenicity in Mice

[0171] Antigenicity of COR200617, COR200619 and COR201225 was assessed with a panel of neutralizing antibodies against the N-terminal domain (NTD) (4A8 (Chi et. al., (2020) and several antibodies that bind either the RBD in the up and down or antibodies that only bind RBD in the up configuration. See Henderson et. al., (2020) for the definition of ‘up’ and ‘down’. The following antibodies are directed against the closed conformation of spike and recognize both the up and down state: COVA1-22 (Brouwers et. al., (2020)), against the RBD in the ‘up’ or ‘down’ position (S2M11 (Tortorice et. al., (2020)), C144 (Barnes et. al., (2020), 2-43 (Liu et al, (2020)) and COVA2-15 Brouwers et. al., (2020)). The following antibodies are directed against the RBD in the open conformation of spike and recognize the up state: (ACE2-Fc and SAD-S35 (AcroBiosystems), as described below. As shown in FIG. 14, the non-neutralizing antibodies CR3022 (Yuan et al., (2020)), CR3015 and CR3046 do not bind to the pre-fusion conformation. CR3022 can only bind when 2 RBDs are in the up configuration. These three antibodies bind well to COR200627, but not to COR200619 and COR201225, indicating that COR200627 lost (part) of its pre-fusion conformation, whereas COR200619 and COR201225 are in the pre-fusion conformation. The ACE2-Fc and SAD-S35, which bind to the RBD when it is in the “up” position, bind less to COR200619 and COR201225 than to COR200627 indicating that COR200619 and COR201225 have more RBDs in the down position and is thus more closed than COR200627.

[0172] Antibodies were immobilized on anti-hIgG (AHC) sensors (FortéBio, cat. #18-5060) in 1×kinetics buffer (FortéBio, cat. #18-1092) in 96-well black flat-bottom polypropylene microplates (FortéBio, cat. #3694). The experiment was performed on an Octet RED384 instrument (Pall-FortéBio) at 30° C. with a shaking speed of 1000 rpm. Activation was 600 s, immobilization of antibodies 900 s, followed by washing for 600 s, and then binding the S proteins for 300 s. The data analysis was performed using the FortéBio Data Analysis 12.0 software (FortéBio).

### Example 13: COR200619 and COR201225 are Immunogenic in Mice

[0173] In this example the in vivo immunogenicity of recombinant SARS-COV-2 Spike proteins of the invention was assessed. SARS-COV-2 S proteins were generated that were stabilized in a predominantly closed conformation: COR201225 and COR200619. The immunogenicity was compared to a stabilized SARS-COV-2 spike protein with an open conformation (COR200627).

[0174] The Spike protein variants thus were presented from most closed (top) to the most open variant (bottom). All constructs had furin knockout mutations (R682S R685G). In addition, the constructs contained the stabilizing mutations that are shown in the table below:

| Structure | Construct | Conformation | Stabilizing mutations |
|---|---|---|---|
| [symbol] | COR201225 | Predominantly | N532P, T572I D614G, G880C, |
| | | closed | F888C, A944P, V987P |
| [symbol] | COR200619 | Predominantly | D614N, A892P, A942P, V987P |
| | | closed | |
| [symbol] | COR200627 | Open | A942P, K986P, V987P |
| | | (foldon) | |

[0175] Groups of 7 female BALB/c mice (age 8-10 weeks at the start of the study) were intramuscularly immunized with 5 or 0.5 μg S protein with 100 μg aluminium hydroxide adjuvant on day 0 and day 28. Mice were bled on day 27 and 41 to analyze neutralizing antibody responses against SARS-COV-2 B.1 (Wuhan-Hu-1+D614G) Spike protein by a pseudovirion neutralization assay (psVNA) or the SARS-COV-2 L-0008 isolate (lineage B.1) by wild-type VNA (wtVNA). See Solforosi et al., for details on the assays used.

### Results

[0176] Neutralizing antibody titers against the SARS-COV-2 isolate L-0008 (lineage B.1) were undetectable or close to the LLOD four weeks (day 27) after immunization with one dose of COR200627 (open conformation) as measured by a wild-type virus neutralization assay (wtVNA) (FIG. 16). In contrast, COR201225 and COR200619 (predominantly closed) elicited neutralizing antibodies against the SARS-COV-2 isolate L-0008 in a dose dependent manner four weeks after immunization. This difference between COR200627 (open conformation) and COR201225 and COR200619 (predominantly closed) was also observed in a pseudovirion neutralization (psVNA) assay against the SARS-COV-2 B.1 Spike protein. In this assay, COR200627 (open conformation) did not induce neutralizing antibody titers against SARS-COV-2 B.1 Spike protein as measured by psVNA, while COR201225 and COR200619 (predominantly closed conformation) promoted neutralizing antibody titers in a dose-dependent manner (FIG. 16). Two weeks after the second dose at week 6 (day 41) detectable neutralization titers against SARS-COV-2 B.1 Spike protein were observed for all constructs by psVNA. However, higher neutralization titers were observed in mice immunized with COR201225 and COR200619 (predominantly closed conformation), compared to COR200627 (open conformation)

### Conclusion

[0177] According to the present invention, it thus has been shown that COR201225 and COR200619 (predominantly closed and containing stabilizing mutations according to the invention) are immunogenic in mice and induce higher neutralizing antibody levels against SARS-COV-2, compared to COR200627 (open conformation) 4 and 6 weeks after immunization.

### Example 14: Stabilization without K986P and V987P

[0178] As shown in the previous examples, the substitutions A942P, A944P, A892P and F880C-G888C increased the trimer yield of soluble S protein without the K986P and V987P substantially (FIGS. 4 and 6 lower panels). A892P, T572I and D614N reduced the binding substantially of non-neutralizing antibodies to membrane bound S without any further modifications, indicating more stabilized S trimers (FIG. 14). Combining the substitutions N532P, T572I, D614G, F880C-G888C and A944P, but no K986P or V987P (in COR201291) resulted in much higher trimer yield than measured for the S-2P only protein (COR200017) as shown by analytical SEC with cell culture supernatant (FIG. 17). The S-2P has a foldon for trimerization, whereas the COR201291 does not and therefore also produces some monomers. These examples show that the mutations of the invention that increase trimer expression or stabilize the trimer are independent of and superior to the previously described K986P and V987P substitutions.

### Example 15: Cryo-EM Structure of Wuhan-Hu-01 Quadruple Mutant D614N+A892P+A942P+V987P with Foldon

[0179] Four stabilizing mutations D614N, A892P, A942P and V987P were introduced in the Wuhan-Hu-01 sequence. The quadruple mutant was then imaged by cryo-EM. A 2-steps 3D classification illustrates that out of 833,000 classified particles, ˜80% was closed with all RBDs in the down state and 38% was categorized into a well-defined closed class while ˜20% showed 1 RBD-up (FIG. 18). Further processing of the 320,000 closed conformation particles allowed us to obtain a 2.8 Å electron potential map for the closed conformation and a 3.0 Å electron potential map for the 1 RBD-up (one up) conformation (FIG. 19). An atomic model that was built into the 2.8 Å electron potential map confirmed that S retains the prefusion spike conformation. The NTDs and RBDs density is less defined than for the rest of the map, suggesting flexibility in these regions. The closed structure is highly reminiscent of the one previously solved by Walls et al. (Walls, Park et al. 2020) The two structures differ by 2.2 Å all atom RMSD and there are no significant differences in terms of relative position of domains or domain conformation. The RBD is relatively more defined and the NTD less defined compared to the closed trimer described by Walls et al. The stabilizing mutations do not significantly affect backbone conformation of the closed trimer. The viral spike is mostly closed and structurally very similar to other known closed S-2P spike conformations (Walls, Park et al. 2020, Xiong, Qu et al. 2020) and especially the closed wild-type structure of Xiong at al (Xiong, Qu et al. 2020), with all atom RMSD of 1.7 Å.

### Cryo-EM Grid Preparation and Data Collection

[0180] SARS-COV-2 S protein samples were prepared in 20 mM Tris, 150 mM NaCl, pH7 buffer at a concentration of 0.15 mg/mL and applied to glow discharged Quantifoil R2/2 200 mesh grids before being double side blotted for 3 seconds in a Vitrobot Mark IV (Thermo Fisher Scientific and plunge frozen into liquid ethane cooled. Grids were loaded into a Titan Krios electron microscope (Thermo Fisher Scientific) operated at 300 kV, equipped with a Gatan K3 BioQuantum direct electron detector. A total of 9,760 movies were collected over two microscopy sessions at The Netherlands Centre for Electron Nanoscopy (NeCEN). Detailed data acquisition parameters are summarized in Table 1.

### Cryo-EM Image Processing

[0181] Collected movies were imported into RELION-3.1-beta (Zivanov, Nakane et al. 2018) and subjected to beam induced drift correction using MotionCor2 (Zheng, Palovcak et al. 2017) and CTF estimation by CTFFIND-4.1.18 (Rohou and Grigorieff 2015). Detailed steps of the image processing workflow are illustrated in FIG. 17. Final reconstructions were sharpened and locally filtered in RELION post-processing.

### Model Building and Refinement

[0182] The SARS-COV-2 S PDBID 6VXX and 6VSB structures (Walls, Park et al. 2020, Wrapp, Wang et al. 2020) were used as starting models. PHENIX-1.18.261 (Liebschner, Afonine et al. 2019), Coot (Emsley, Lohkamp et al. 2010) and the Namdinator webserver (Kidmose, Juhl et al. 2019) were iteratively used to build atomic models. Geometry and statistics are given in Table 4 and 5. Final maps were displayed using UCSF ChimeraX (Goddard, Huang et al. 2018).

TABLE 1
Standard amino acids, abbreviations and properties

| | | | Side chain | Side chain |
|---|---|---|---|---|
| Amino Acid | 3-Letter | 1-Letter | polarity | charge (pH 7.4) |
| alanine | Ala | A | non-polar | Neutral |
| arginine | Arg | R | Polar | Positive |
| asparagine | Asn | N | Polar | Neutral |
| aspartic acid | Asp | D | polar | Negative |
| cysteine | Cys | C | non-polar | Neutral |
| glutamic acid | Glu | E | polar | Negative |
| glutamine | Gln | Q | polar | Neutral |
| glycine | Gly | G | non-polar | Neutral |
| histidine | His | H | polar | positive(10%) |
| | | | | neutral(90%) |
| isoleucine | Ile | I | non-polar | Neutral |
| leucine | Leu | L | non-polar | Neutral |
| lysine | Lys | K | polar | Positive |
| methionine | Met | M | non-polar | Neutral |
| phenylalanine | Phe | F | non-polar | Neutral |
| proline | Pro | P | non-polar | Neutral |
| serine | Ser | S | polar | Neutral |
| threonine | Thr | T | polar | Neutral |
| tryptophan | Trp | W | non-polar | Neutral |
| tyrosine | Tyr | Y | polar | Neutral |
| valine | Val | V | non-polar | Neutral |

TABLE 2
SEC-MALS analysis

| | Trimer peak | | | | LMW species | | | | |
|---|---|---|---|---|---|---|---|---|---|
| | | | Mass | Retention | | | Mass | Retention | Total |
| | Mw | Rh | fraction | time | Mw | Rh | fraction | time | Recovery |
| Mutation | (kDa) | (nm) | (%) | (min) | (kDa) | (nm) | (%) | (min) | (%) |
| A892P_A942P_D614N_V987P_Δfoldon | 465.6 | 9.165 | 89.8 | 5.319 | ND* | ND* | 8.7 | 5.647 | 96.7* |
| A892P_A942P_D614N_V987P | 491 | 9.909 | 100 | 5.08 | — | — | — | — | 86.6 |

TABLE 3
S trimer content (%) after repeated freeze-thaw steps

| Mutation(s) | 0x FT | 1x FT | 3x FT | 5x FT |
|---|---|---|---|---|
| S-2P | 100 | 67 | 8 | 1 |
| S-2P-D614N | 100 | 83 | 43 | 12 |
| S-2P-F888C_G880C | 100 | 75 | 24 | 4 |
| S-2P-N532P | 100 | 72 | 24 | 3 |
| S-2P-A892P | 100 | 80 | 21 | 3 |
| S-2P-A942P | 100 | 60 | 13 | 3 |
| S-2P-T572I | 100 | 81 | 22 | 3 |
| No muts | 100 | 73 | 10 | 1 |
| D614G | 100 | 72 | 21 | 3 |
| A892P_A942P | 100 | 82 | 29 | 4 |
| A892P_A942P_D614N_K986P_V987P | 100 | 77 | 31 | 11 |
| A892P_A942P_D614N_V987P | 100 | 74 | 34 | 8 |
| A892P_A942P_D614N_V987P_Δfoldon | 100 | 78 | 55 | 35 |

TABLE 4
Cryo-EM data collection

| | S-closed + Fd quadruple |
|---|---|
| | mutant |
| Magnification | 105,000 |
| Data collection/Final Pixel size (Å) | 0.418/0.836 |
| Voltage (kV) | 300 |
| Electron exposure (e⁻/Å²) | 65 |
| Frames | 50 |
| Defocus Range (μm) | −0.6 to −2.5 |
| Number of movies collected | 9,760 |
| Particles extracted | 1,400,000 |
| Final (closed/opened) | 315,000/166,000 |
| Symmetry | N/A |
| Masked resolution at FSC = 0.143 (Å) | 2.75/2.92 |
| (closed/opened) | |
| Map sharpening B-factor (Å²) | −52/−51 |
| (closed/opened) | |
| EMDB | EMD-11639/EMD-11719 |

TABLE 5
Model refinement and validation statistics

| | | Closed trimer | One up trimer |
|---|---|---|---|
| PDB | | 7A4N | 7AD1 |
| Model compositions | Amino Acids | 2889 | 2841 |
| | Glycans | 21 | 35 |
| Mean B factors (Å²) | Amino Acids | 94.53 | 107.22 |
| | Glycans | 75.34 | 112.75 |
| R.m.s. deviations | Bond lengths (Å) | 0.008 | 0.016 |
| | Bond angles (°) | 1.057 | 1.260 |
| Validation | MolProbity score | 1.53 | 1.95 |
| | Clashscore | 5.08 | 8.72 |
| | Rotamers outliers (%) | 0.20 | 0.00 |
| | EMRinger score | 3.64 | 3.51 |
| Ramachandran plot | Favored (%) | 96.14 | 92.15 |
| | Allowed (%) | 3.86 | 7.85 |
| | Outliers (%) | 0.00 | 0.00 |

### REFERENCES

[0183] Belouzard et al. (2009), Proc Natl Acad Sci USA 106:5871-6.
[0184] Bosch et al. (2008), J Virol 82:8887-90.
[0185] Follis et al. (2006) Virology 350:358-69.
[0186] Madu et al. (2009), J Virol 83:7411-21.
[0187] Walls et al. (2016), Nature 531:114-7.
[0188] Wrapp et. al. (2020) Science 367(6482): 1260-1263.
[0189] Hoffmann et al. (2020) BioRxiv: doi: https://doi.org/10.1101/2020.01.31.929042
[0190] Bestle et al (2020) BioRxiv doi: https://doi.org/10.1101/2020.04.15.042085
[0191] Hastie et al. (2017), Science 356, 923-928.
[0192] Krarup et al (2015), Nat Commun 6, 8143.
[0193] Pallesen et al. (2017), Proc Natl Acad Sci USA 114, E7348-E7357.
[0194] Rutten et al. (2020), Cell Rep. 30(13):4540-4550.
[0195] Letarov et al. (1993), Biochemistry Moscow 64: 817-823.
[0196] S-Guthe et al. (2004), J. Mol. Biol. 337: 905-915
[0197] Pinto et al. (2020), Nature, May 18^{th}
[0198] Liu et al., (2017), 10.1016/j.kint.2018.01.029
[0199] Brouwers et al., (2020), 10.1126/science.abc5902
[0200] van den Brink et al., (2005) 10.1128/JVI.79.3.1635-1644.2005
[0201] Bos et al., (2020) 10.1038/s41541-020-00243-x
[0202] Chi (2020), 10.1126/science.abc6952
[0203] Tortorice (2020), 10.1126/science.abe3354
[0204] Barnes (2020) 10.1038/s41586-020-2852-1
[0205] Liu et al., (2020) 10.1038/s41586-020-2571-7
[0206] Yuan et al, (2020) 10.1126/science.abb7269
[0207] Solforosi et al., J Exp Med. 2021 Jul. 5; 218(7):e20202756. doi: 10.1084/jem.20202756.
[0208] Henderson et al., doi: 10.1038/s41594-020-0479-4.
[0209] Emsley et al., (2010) Acta Crystallogr D Biol Crystallogr 66(Pt 4): 486-501.
[0210] Goddard et al., Protein Sci 27(1): 14-25.
[0211] Kidmose et al., (2019) IUCrJ 6(Pt 4): 526-531.
[0212] Liebschner et al., (2019) Acta Crystallogr D Struct Biol 75(Pt 10): 861-877.
[0213] Rohou, A. and N. Grigorieff (2015) J Struct Biol 192(2): 216-221.
[0214] Walls et al., (2020) Cell 181(2): 281-292 e286.
[0215] Wrapp et al., (2020) Science 367(6483): 1260-1263.
[0216] Xiong et al., (2020) “A thermostable, closed SARS-COV-2 spike protein trimer.” Nat Struct Mol Biol.
[0217] Zheng et al., (2017) Nat Methods 14(4): 331-332.
[0218] Zivanov et al., (2018) New tools for automated high-resolution cryo-EM structure determination in RELION-3 Elife 7.

Sequences
SEQ ID NO 1: full length S protein
(underline signal peptide, double underline TM
and cytoplasmic domain that is deleted in the
soluble version)
MFVFLVLLPLVSSQCVNLTTRTQLPPAYTNSFTRGVYYPDKVFRSSVLHSTQDLFLPFFSNVTWF
HAIHVSGTNGTKRFDNPVLPFNDGVYFASTEKSNIIRGWIFGTTLDSKTQSLLIVNNATNVVIKV
CEFQFCNDPFLGVYYHKNNKSWMESEFRVYSSANNCTFEYVSQPFLMDLEGKQGNFKNLREFVFK
NIDGYFKIYSKHTPINLVRDLPQGFSALEPLVDLPIGINITRFQTLLALHRSYLTPGDSSSGWTA
GAAAYYVGYLQPRTFLLKYNENGTITDAVDCALDPLSETKCTLKSFTVEKGIYQTSNFRVQPTES
IVRFPNITNLCPFGEVFNATRFASVYAWNRKRISNCVADYSVLYNSASFSTFKCYGVSPTKLNDL
CFTNVYADSFVIRGDEVRQIAPGQTGKIADYNYKLPDDFTGCVIAWNSNNLDSKVGGNYNYLYRL
FRKSNLKPFERDISTEIYQAGSTPCNGVEGFNCYFPLQSYGFQPTNGVGYQPYRVVVLSFELLHA
PATVCGPKKSTNLVKNKCVNFNFNGLTGTGVLTESNKKFLPFQQFGRDIADTTDAVRDPQTLEIL
DITPCSFGGVSVITPGTNTSNQVAVLYQDVNCTEVPVAIHADQLTPTWRVYSTGSNVFQTRAGCL
IGAEHVNNSYECDIPIGAGICASYQTQTNSPRRARSVASQSIIAYTMSLGAENSVAYSNNSIAIP
TNFTISVTTEILPVSMTKTSVDCTMYICGDSTECSNLLLQYGSFCTQLNRALTGIAVEQDKNTQE
VFAQVKQIYKTPPIKDFGGFNFSQILPDPSKPSKRSFIEDLLFNKVTLADAGFIKQYGDCLGDIA
ARDLICAQKFNGLTVLPPLLTDEMIAQYTSALLAGTITSGWTFGAGAALQIPFAMQMAYRFNGIG
VTQNVLYENQKLIANQFNSAIGKIQDSLSSTASALGKLQDVVNQNAQALNTLVKQLSSNFGAISS
VLNDILSRLDKVEAEVQIDRLITGRLQSLQTYVTQQLIRAAEIRASANLAATKMSECVLGQSKRV
DFCGKGYHLMSFPQSAPHGVVFLHVTYVPAQEKNFTTAPAICHDGKAHFPREGVFVSNGTHWFVT
QRNFYEPQIITTDNTFVSGNCDVVIGIVNNTVYDPLQPELDSFKEELDKYFKNHTSPDVDLGDIS
GINASVVNIQKEIDRLNEVAKNLNESLIDLQELGKYEQYIKWPWYIWLGFIAGLIAIVMVTIMLC
CMTSCCSCLKGCCSCGSCCKFDEDDSEPVLKGVKLHYT
SEQ ID NO 2: soluble S protein with furin KO,
underline signal peptide, double underline linker,
foldon, tags etc.)
MFVFLVLLPLVSSQCVNLTTRTQLPPAYTNSFTRGVYYPDKVFRSSVLHSTQDLFLPFFSNVTWF
HAIHVSGTNGTKRFDNPVLPFNDGVYFASTEKSNIIRGWIFGTTLDSKTQSLLIVNNATNVVIKV
CEFQFCNDPFLGVYYHKNNKSWMESEFRVYSSANNCTFEYVSQPFLMDLEGKQGNFKNLREFVFK
NIDGYFKIYSKHTPINLVRDLPQGFSALEPLVDLPIGINITRFQTLLALHRSYLTPGDSSSGWTA
GAAAYYVGYLQPRTFLLKYNENGTITDAVDCALDPLSETKCTLKSFTVEKGIYQTSNFRVQPTES
IVRFPNITNLCPFGEVFNATRFASVYAWNRKRISNCVADYSVLYNSASFSTFKCYGVSPTKLNDL
CFTNVYADSFVIRGDEVRQIAPGQTGKIADYNYKLPDDFTGCVIAWNSNNLDSKVGGNYNYLYRL
FRKSNLKPFERDISTEIYQAGSTPCNGVEGFNCYFPLQSYGFQPTNGVGYQPYRVVVLSFELLHA
PATVCGPKKSTNLVKNKCVNFNFNGLTGTGVLTESNKKFLPFQQFGRDIADTTDAVRDPQTLEIL
DITPCSFGGVSVITPGTNTSNQVAVLYQDVNCTEVPVAIHADQLTPTWRVYSTGSNVFQTRAGCL
IGAEHVNNSYECDIPIGAGICASYQTQTNSPSRAGSVASQSIIAYTMSLGAENSVAYSNNSIAIP
TNFTISVTTEILPVSMTKTSVDCTMYICGDSTECSNLLLQYGSFCTQLNRALTGIAVEQDKNTQE
VFAQVKQIYKTPPIKDFGGFNFSQILPDPSKPSKRSFIEDLLFNKVTLADAGFIKQYGDCLGDIA
ARDLICAQKFNGLTVLPPLLTDEMIAQYTSALLAGTITSGWTFGAGAALQIPFAMQMAYRFNGIG
VTQNVLYENQKLIANQFNSAIGKIQDSLSSTASALGKLQDVVNQNAQALNTLVKQLSSNFGAISS
VLNDILSRLDKVEAEVQIDRLITGRLQSLQTYVTQQLIRAAEIRASANLAATKMSECVLGQSKRV
DFCGKGYHLMSFPQSAPHGVVFLHVTYVPAQEKNFTTAPAICHDGKAHFPREGVFVSNGTHWFVT
QRNFYEPQIITTDNTFVSGNCDVVIGIVNNTVYDPLQPELDSFKEELDKYFKNHTSPDVDLGDIS
GINASVVNIQKEIDRLNEVAKNLNESLIDLQELGKYEQGSGYIPEAPRDGQAYVRKDGEWVLLST
FLGRSLEVLFQGPGSLPETGGGSDYKDDDDKGGGGSGGGGGGGGSGGGGSGGGGSHHHHHH
SEQ ID NO 3: soluble S protein with Furin KO and
double proline in the hinge loop. (underline signal
peptide) double underline linker, foldon, tags etc.)
MFVFLVLLPLVSSQCVNLTTRTQLPPAYTNSFTRGVYYPDKVFRSSVLHSTQDLFLPFFSNVTWF
HAIHVSGTNGTKRFDNPVLPFNDGVYFASTEKSNIIRGWIFGTTLDSKTQSLLIVNNATNVVIKV
CEFQFCNDPFLGVYYHKNNKSWMESEFRVYSSANNCTFEYVSQPFLMDLEGKQGNFKNLREFVFK
NIDGYFKIYSKHTPINLVRDLPQGFSALEPLVDLPIGINITRFQTLLALHRSYLTPGDSSSGWTA
GAAAYYVGYLQPRTFLLKYNENGTITDAVDCALDPLSETKCTLKSFTVEKGIYQTSNFRVQPTES
IVRFPNITNLCPFGEVFNATRFASVYAWNRKRISNCVADYSVLYNSASFSTFKCYGVSPTKLNDL
CFTNVYADSFVIRGDEVRQIAPGQTGKIADYNYKLPDDFTGCVIAWNSNNLDSKVGGNYNYLYRL
FRKSNLKPFERDISTEIYQAGSTPCNGVEGFNCYFPLQSYGFQPTNGVGYQPYRVVVLSFELLHA
PATVCGPKKSTNLVKNKCVNFNFNGLTGTGVLTESNKKFLPFQQFGRDIADTTDAVRDPQTLEIL
DITPCSFGGVSVITPGTNTSNQVAVLYQDVNCTEVPVAIHADQLTPTWRVYSTGSNVFQTRAGCL
IGAEHVNNSYECDIPIGAGICASYQTQTNSPSRAGSVASQSIIAYTMSLGAENSVAYSNNSIAIP
TNFTISVTTEILPVSMTKTSVDCTMYICGDSTECSNLLLQYGSFCTQLNRALTGIAVEQDKNTQE
VFAQVKQIYKTPPIKDFGGFNFSQILPDPSKPSKRSFIEDLLFNKVTLADAGFIKQYGDCLGDIA
ARDLICAQKFNGLTVLPPLLTDEMIAQYTSALLAGTITSGWTFGAGAALQIPFAMQMAYRFNGIG
VTQNVLYENQKLIANQFNSAIGKIQDSLSSTASALGKLQDVVNQNAQALNTLVKQLSSNFGAISS
VLNDILSRLDPPEAEVQIDRLITGRLQSLQTYVTQQLIRAAEIRASANLAATKMSECVLGQSKRV
DFCGKGYHLMSFPQSAPHGVVFLHVTYVPAQEKNFTTAPAICHDGKAHFPREGVFVSNGTHWFVT
QRNFYEPQIITTDNTFVSGNCDVVIGIVNNTVYDPLQPELDSFKEELDKYFKNHTSPDVDLGDIS
GINASVVNIQKEIDRLNEVAKNLNESLIDLQELGKYEQGSGYIPEAPRDGQAYVRKDGEWVLLST
FLGRSLEVLFQGPGSLPETGGGSDYKDDDDKGGGGSGGGGSGGGGSGGGGSGGGGSHHHHHH
SEQ ID NO 4: foldon
GYIPEAPRDGQAYVRKDGEWVLLSTFL
SEQ ID NO 5: SEQ ID NO 2 + A942P
MFVFLVLLPLVSSQCVNLTTRTQLPPAYTNSFTRGVYYPDKVFRSSVLHSTQDLFLPFFSNVTWF
HAIHVSGTNGTKRFDNPVLPFNDGVYFASTEKSNIIRGWIFGTTLDSKTQSLLIVNNATNVVIKV
CEFQFCNDPFLGVYYHKNNKSWMESEFRVYSSANNCTFEYVSQPFLMDLEGKQGNFKNLREFVFK
NIDGYFKIYSKHTPINLVRDLPQGFSALEPLVDLPIGINITRFQTLLALHRSYLTPGDSSSGWTA
GAAAYYVGYLQPRTFLLKYNENGTITDAVDCALDPLSETKCTLKSFTVEKGIYQTSNFRVQPTES
IVRFPNITNLCPFGEVFNATRFASVYAWNRKRISNCVADYSVLYNSASFSTFKCYGVSPTKLNDL
CFTNVYADSFVIRGDEVRQIAPGQTGKIADYNYKLPDDFTGCVIAWNSNNLDSKVGGNYNYLYRL
FRKSNLKPFERDISTEIYQAGSTPCNGVEGFNCYFPLQSYGFQPTNGVGYQPYRVVVLSFELLHA
PATVCGPKKSTNLVKNKCVNFNFNGLTGTGVLTESNKKFLPFQQFGRDIADTTDAVRDPQTLEIL
DITPCSFGGVSVITPGTNTSNQVAVLYQDVNCTEVPVAIHADQLTPTWRVYSTGSNVFQTRAGCL
IGAEHVNNSYECDIPIGAGICASYQTQTNSPSRAGSVASQSIIAYTMSLGAENSVAYSNNSIAIP
TNFTISVTTEILPVSMTKTSVDCTMYICGDSTECSNLLLQYGSFCTQLNRALTGIAVEQDKNTQE
VFAQVKQIYKTPPIKDFGGFNFSQILPDPSKPSKRSFIEDLLFNKVTLADAGFIKQYGDCLGDIA
ARDLICAQKFNGLTVLPPLLTDEMIAQYTSALLAGTITSGWTFGAGAALQIPFAMQMAYRFNGIG
VTQNVLYENQKLIANQFNSAIGKIQDSLSSTPSALGKLQDVVNQNAQALNTLVKQLSSNFGAISS
VLNDILSRLDKVEAEVQIDRLITGRLQSLQTYVTQQLIRAAEIRASANLAATKMSECVLGQSKRV
DFCGKGYHLMSFPQSAPHGVVFLHVTYVPAQEKNFTTAPAICHDGKAHFPREGVFVSNGTHWFVT
QRNFYEPQIITTDNTFVSGNCDVVIGIVNNTVYDPLQPELDSFKEELDKYFKNHTSPDVDLGDIS
GINASVVNIQKEIDRLNEVAKNLNESLIDLQELGKYEQGSGYIPEAPRDGQAYVRKDGEWVLLST
FLGRSLEVLFQGPGSLPETGGGSDYKDDDDKGGGGSGGGGSGGGGSGGGGSGGGGSHHHHHH
SEQ ID NO 6: SEQ ID NO 2 + A892P
MFVFLVLLPLVSSQCVNLTTRTQLPPAYTNSFTRGVYYPDKVFRSSVLHSTQDLFLPFFSNVTWF
HAIHVSGTNGTKRFDNPVLPFNDGVYFASTEKSNIIRGWIFGTTLDSKTQSLLIVNNATNVVIKV
CEFQFCNDPFLGVYYHKNNKSWMESEFRVYSSANNCTFEYVSQPFLMDLEGKQGNFKNLREFVFK
NIDGYFKIYSKHTPINLVRDLPQGFSALEPLVDLPIGINITRFQTLLALHRSYLTPGDSSSGWTA
GAAAYYVGYLQPRTFLLKYNENGTITDAVDCALDPLSETKCTLKSFTVEKGIYQTSNFRVQPTES
IVRFPNITNLCPFGEVFNATRFASVYAWNRKRISNCVADYSVLYNSASFSTFKCYGVSPTKLNDL
CFTNVYADSFVIRGDEVRQIAPGQTGKIADYNYKLPDDFTGCVIAWNSNNLDSKVGGNYNYLYRL
FRKSNLKPFERDISTEIYQAGSTPCNGVEGFNCYFPLQSYGFQPTNGVGYQPYRVVVLSFELLHA
PATVCGPKKSTNLVKNKCVNFNFNGLTGTGVLTESNKKFLPFQQFGRDIADTTDAVRDPQTLEIL
DITPCSFGGVSVITPGTNTSNQVAVLYQDVNCTEVPVAIHADQLTPTWRVYSTGSNVFQTRAGCL
IGAEHVNNSYECDIPIGAGICASYQTQTNSPSRAGSVASQSIIAYTMSLGAENSVAYSNNSIAIP
TNFTISVTTEILPVSMTKTSVDCTMYICGDSTECSNLLLQYGSFCTQLNRALTGIAVEQDKNTQE
VFAQVKQIYKTPPIKDFGGFNFSQILPDPSKPSKRSFIEDLLFNKVTLADAGFIKQYGDCLGDIA
ARDLICAQKFNGLTVLPPLLTDEMIAQYTSALLAGTITSGWTFGAGPALQIPFAMQMAYRFNGIG
VTQNVLYENQKLIANQFNSAIGKIQDSLSSTASALGKLQDVVNQNAQALNTLVKQLSSNFGAISS
VLNDILSRLDKVEAEVQIDRLITGRLQSLQTYVTQQLIRAAEIRASANLAATKMSECVLGQSKRV
DFCGKGYHLMSFPQSAPHGVVFLHVTYVPAQEKNFTTAPAICHDGKAHFPREGVFVSNGTHWFVT
QRNFYEPQIITTDNTFVSGNCDVVIGIVNNTVYDPLQPELDSFKEELDKYFKNHTSPDVDLGDIS
GINASVVNIQKEIDRLNEVAKNLNESLIDLQELGKYEQGSGYIPEAPRDGQAYVRKDGEWVLLST
FLGRSLEVLFQGPGSLPETGGGSDYKDDDDKGGGGSGGGGSGGGGSGGGGSGGGGSHHHHHH
SEQ ID NO 7: SEQ ID NO 2 + D614N
MFVFLVLLPLVSSQCVNLTTRTQLPPAYTNSFTRGVYYPDKVFRSSVLHSTQDLFLPFFSNVTWF
HAIHVSGTNGTKRFDNPVLPFNDGVYFASTEKSNIIRGWIFGTTLDSKTQSLLIVNNATNVVIKV
CEFQFCNDPFLGVYYHKNNKSWMESEFRVYSSANNCTFEYVSQPFLMDLEGKQGNFKNLREFVFK
NIDGYFKIYSKHTPINLVRDLPQGFSALEPLVDLPIGINITRFQTLLALHRSYLTPGDSSSGWTA
GAAAYYVGYLQPRTFLLKYNENGTITDAVDCALDPLSETKCTLKSFTVEKGIYQTSNFRVQPTES
IVRFPNITNLCPFGEVFNATRFASVYAWNRKRISNCVADYSVLYNSASFSTFKCYGVSPTKLNDL
CFTNVYADSFVIRGDEVRQIAPGQTGKIADYNYKLPDDFTGCVIAWNSNNLDSKVGGNYNYLYRL
FRKSNLKPFERDISTEIYQAGSTPCNGVEGFNCYFPLQSYGFQPTNGVGYQPYRVVVLSFELLHA
PATVCGPKKSTNLVKNKCVNFNFNGLTGTGVLTESNKKFLPFQQFGRDIADTTDAVRDPQTLEIL
DITPCSFGGVSVITPGTNTSNQVAVLYQNVNCTEVPVAIHADQLTPTWRVYSTGSNVFQTRAGCL
IGAEHVNNSYECDIPIGAGICASYQTQTNSPSRAGSVASQSIIAYTMSLGAENSVAYSNNSIAIP
TNFTISVTTEILPVSMTKTSVDCTMYICGDSTECSNLLLQYGSFCTQLNRALTGIAVEQDKNTQE
VFAQVKQIYKTPPIKDFGGFNFSQILPDPSKPSKRSFIEDLLFNKVTLADAGFIKQYGDCLGDIA
ARDLICAQKFNGLTVLPPLLTDEMIAQYTSALLAGTITSGWTFGAGAALQIPFAMQMAYRFNGIG
VTQNVLYENQKLIANQFNSAIGKIQDSLSSTASALGKLQDVVNQNAQALNTLVKQLSSNFGAISS
VLNDILSRLDKVEAEVQIDRLITGRLQSLQTYVTQQLIRAAEIRASANLAATKMSECVLGQSKRV
DFCGKGYHLMSFPQSAPHGVVFLHVTYVPAQEKNFTTAPAICHDGKAHFPREGVFVSNGTHWFVT
QRNFYEPQIITTDNTFVSGNCDVVIGIVNNTVYDPLQPELDSFKEELDKYFKNHTSPDVDLGDIS
GINASVVNIQKEIDRLNEVAKNLNESLIDLQELGKYEQGSGYIPEAPRDGQAYVRKDGEWVLLST
FLGRSLEVLFQGPGSLPETGGGSDYKDDDDKGGGGSGGGGSGGGGSGGGGSGGGGSHHHHHH
SEQ ID NO 8: SEQ ID NO 2 + T572I
MFVFLVLLPLVSSQCVNLTTRTQLPPAYTNSFTRGVYYPDKVFRSSVLHSTQDLFLPFFSNVTWFH
AIHVSGTNGTKRFDNPVLPFNDGVYFASTEKSNIIRGWIFGTTLDSKTQSLLIVNNATNVVIKVC
EFQFCNDPFLGVYYHKNNKSWMESEFRVYSSANNCTFEYVSQPFLMDLEGKQGNFKNLREFVFKN
IDGYFKIYSKHTPINLVRDLPQGFSALEPLVDLPIGINITRFQTLLALHRSYLTPGDSSSGWTAG
AAAYYVGYLQPRTFLLKYNENGTITDAVDCALDPLSETKCTLKSFTVEKGIYQTSNFRVQPTESI
VRFPNITNLCPFGEVFNATRFASVYAWNRKRISNCVADYSVLYNSASFSTFKCYGVSPTKLNDLC
FTNVYADSFVIRGDEVRQIAPGQTGKIADYNYKLPDDFTGCVIAWNSNNLDSKVGGNYNYLYRLF
RKSNLKPFERDISTEIYQAGSTPCNGVEGFNCYFPLQSYGFQPTNGVGYQPYRVVVLSFELLHAP
ATVCGPKKSTNLVKNKCVNFNFNGLTGTGVLTESNKKFLPFQQFGRDIADITDAVRDPQTLEILD
ITPCSFGGVSVITPGTNTSNQVAVLYQDVNCTEVPVAIHADQLTPTWRVYSTGSNVFQTRAGCLI
GAEHVNNSYECDIPIGAGICASYQTQTNSPSRAGSVASQSIIAYTMSLGAENSVAYSNNSIAIPT
NFTISVTTEILPVSMTKTSVDCTMYICGDSTECSNLLLQYGSFCTQLNRALTGIAVEQDKNTQEV
FAQVKQIYKTPPIKDFGGFNFSQILPDPSKPSKRSFIEDLLFNKVTLADAGFIKQYGDCLGDIAA
RDLICAQKFNGLTVLPPLLTDEMIAQYTSALLAGTITSGWTFGAGAALQIPFAMQMAYRFNGIGV
TQNVLYENQKLIANQFNSAIGKIQDSLSSTASALGKLQDVVNQNAQALNTLVKQLSSNFGAISSV
LNDILSRLDKVEAEVQIDRLITGRLQSLQTYVTQQLIRAAEIRASANLAATKMSECVLGQSKRVD
FCGKGYHLMSFPQSAPHGVVFLHVTYVPAQEKNFTTAPAICHDGKAHFPREGVFVSNGTHWFVTQ
RNFYEPQIITTDNTFVSGNCDVVIGIVNNTVYDPLQPELDSFKEELDKYFKNHTSPDVDLGDISG
INASVVNIQKEIDRLNEVAKNLNESLIDLQELGKYEQGSGYIPEAPRDGQAYVRKDGEWVLLSTF
LGRSLEVLFQGPGSLPETGGGSDYKDDDDKGGGGSGGGGSGGGGSGGGGSGGGGSHHHHHH
H
SEQ ID NO 9: SEQ ID NO 2 + N532P
MFVFLVLLPLVSSQCVNLTTRTQLPPAYTNSFTRGVYYPDKVFRSSVLHSTQDLFLPFFSNVTWF
HAIHVSGTNGTKRFDNPVLPFNDGVYFASTEKSNIIRGWIFGTTLDSKTQSLLIVNNATNVVIKV
CEFQFCNDPFLGVYYHKNNKSWMESEFRVYSSANNCTFEYVSQPFLMDLEGKQGNFKNLREFVFK
NIDGYFKIYSKHTPINLVRDLPQGFSALEPLVDLPIGINITRFQTLLALHRSYLTPGDSSSGWTA
GAAAYYVGYLQPRTFLLKYNENGTITDAVDCALDPLSETKCTLKSFTVEKGIYQTSNFRVQPTES
IVRFPNITNLCPFGEVFNATRFASVYAWNRKRISNCVADYSVLYNSASFSTFKCYGVSPTKLNDL
CFTNVYADSFVIRGDEVRQIAPGQTGKIADYNYKLPDDFTGCVIAWNSNNLDSKVGGNYNYLYRL
FRKSNLKPFERDISTEIYQAGSTPCNGVEGFNCYFPLQSYGFQPTNGVGYQPYRVVVLSFELLHA
PATVCGPKKSTPLVKNKCVNFNFNGLTGTGVLTESNKKFLPFQQFGRDIADTTDAVRDPQTLEIL
DITPCSFGGVSVITPGTNTSNQVAVLYQDVNCTEVPVAIHADQLTPTWRVYSTGSNVFQTRAGCL
IGAEHVNNSYECDIPIGAGICASYQTQTNSPSRAGSVASQSIIAYTMSLGAENSVAYSNNSIAIP
TNFTISVTTEILPVSMTKTSVDCTMYICGDSTECSNLLLQYGSFCTQLNRALTGIAVEQDKNTQE
VFAQVKQIYKTPPIKDFGGFNFSQILPDPSKPSKRSFIEDLLFNKVTLADAGFIKQYGDCLGDIA
ARDLICAQKFNGLTVLPPLLTDEMIAQYTSALLAGTITSGWTFGAGAALQIPFAMQMAYRFNGIG
VTQNVLYENQKLIANQFNSAIGKIQDSLSSTASALGKLQDVVNQNAQALNTLVKQLSSNFGAISS
VLNDILSRLDKVEAEVQIDRLITGRLQSLQTYVTQQLIRAAEIRASANLAATKMSECVLGQSKRV
DFCGKGYHLMSFPQSAPHGVVFLHVTYVPAQEKNFTTAPAICHDGKAHFPREGVFVSNGTHWFVT
QRNFYEPQIITTDNTFVSGNCDVVIGIVNNTVYDPLQPELDSFKEELDKYFKNHTSPDVDLGDIS
GINASVVNIQKEIDRLNEVAKNLNESLIDLQELGKYEQGSGYIPEAPRDGQAYVRKDGEWVLLST
FLGRSLEVLFQGPGSLPETGGGSDYKDDDDKGGGGSGGGGSGGGGSGGGGSGGGGSHHHHHH
SEQ ID NO 10: SEQ ID NO 2 + G880C + F888C
MFVFLVLLPLVSSQCVNLTTRTQLPPAYTNSFTRGVYYPDKVFRSSVLHSTQDLFLPFFSNVTWF
HAIHVSGTNGTKRFDNPVLPFNDGVYFASTEKSNIIRGWIFGTTLDSKTQSLLIVNNATNVVIKV
CEFQFCNDPFLGVYYHKNNKSWMESEFRVYSSANNCTFEYVSQPFLMDLEGKQGNFKNLREFVFK
NIDGYFKIYSKHTPINLVRDLPQGFSALEPLVDLPIGINITRFQTLLALHRSYLTPGDSSSGWTA
GAAAYYVGYLQPRTFLLKYNENGTITDAVDCALDPLSETKCTLKSFTVEKGIYQTSNFRVQPTES
IVRFPNITNLCPFGEVFNATRFASVYAWNRKRISNCVADYSVLYNSASFSTFKCYGVSPTKLNDL
CFTNVYADSFVIRGDEVRQIAPGQTGKIADYNYKLPDDFTGCVIAWNSNNLDSKVGGNYNYLYRL
FRKSNLKPFERDISTEIYQAGSTPCNGVEGFNCYFPLQSYGFQPTNGVGYQPYRVVVLSFELLHA
PATVCGPKKSTNLVKNKCVNFNFNGLTGTGVLTESNKKFLPFQQFGRDIADTTDAVRDPQTLEIL
DITPCSFGGVSVITPGTNTSNQVAVLYQDVNCTEVPVAIHADQLTPTWRVYSTGSNVFQTRAGCL
IGAEHVNNSYECDIPIGAGICASYQTQTNSPSRAGSVASQSIIAYTMSLGAENSVAYSNNSIAIP
TNFTISVTTEILPVSMTKTSVDCTMYICGDSTECSNLLLQYGSFCTQLNRALTGIAVEQDKNTQE
VFAQVKQIYKTPPIKDFGGFNFSQILPDPSKPSKRSFIEDLLFNKVTLADAGFIKQYGDCLGDIA
ARDLICAQKFNGLTVLPPLLTDEMIAQYTSALLACTITSGWTCGAGAALQIPFAMQMAYRFNGIG
VTQNVLYENQKLIANQFNSAIGKIQDSLSSTASALGKLQDVVNQNAQALNTLVKQLSSNFGAISS
VLNDILSRLDKVEAEVQIDRLITGRLQSLQTYVTQQLIRAAEIRASANLAATKMSECVLGQSKRV
DFCGKGYHLMSFPQSAPHGVVFLHVTYVPAQEKNFTTAPAICHDGKAHFPREGVFVSNGTHWFVT
QRNFYEPQIITTDNTFVSGNCDVVIGIVNNTVYDPLQPELDSFKEELDKYFKNHTSPDVDLGDIS
GINASVVNIQKEIDRLNEVAKNLNESLIDLQELGKYEQGSGYIPEAPRDGQAYVRKDGEWVLLST
FLGRSLEVLFQGPGSLPETGGGSDYKDDDDKGGGGSGGGGSGGGGSGGGGSGGGGSHHHHHH
SEQ ID NO 11: SEQ ID NO 2 + S884C + A893C
MFVFLVLLPLVSSQCVNLTTRTQLPPAYTNSFTRGVYYPDKVFRSSVLHSTQDLFLPFFSNVTWF
HAIHVSGTNGTKRFDNPVLPFNDGVYFASTEKSNIIRGWIFGTTLDSKTQSLLIVNNATNVVIKV
CEFQFCNDPFLGVYYHKNNKSWMESEFRVYSSANNCTFEYVSQPFLMDLEGKQGNFKNLREFVFK
NIDGYFKIYSKHTPINLVRDLPQGFSALEPLVDLPIGINITRFQTLLALHRSYLTPGDSSSGWTA
GAAAYYVGYLQPRTFLLKYNENGTITDAVDCALDPLSETKCTLKSFTVEKGIYQTSNFRVQPTES
IVRFPNITNLCPFGEVFNATRFASVYAWNRKRISNCVADYSVLYNSASFSTFKCYGVSPTKLNDL
CFTNVYADSFVIRGDEVRQIAPGQTGKIADYNYKLPDDFTGCVIAWNSNNLDSKVGGNYNYLYRL
FRKSNLKPFERDISTEIYQAGSTPCNGVEGFNCYFPLQSYGFQPTNGVGYQPYRVVVLSFELLHA
PATVCGPKKSTNLVKNKCVNFNFNGLTGTGVLTESNKKFLPFQQFGRDIADTTDAVRDPQTLEIL
DITPCSFGGVSVITPGTNTSNQVAVLYQDVNCTEVPVAIHADQLTPTWRVYSTGSNVFQTRAGCL
IGAEHVNNSYECDIPIGAGICASYQTQTNSPSRAGSVASQSIIAYTMSLGAENSVAYSNNSIAIP
TNFTISVTTEILPVSMTKTSVDCTMYICGDSTECSNLLLQYGSFCTQLNRALTGIAVEQDKNTQE
VFAQVKQIYKTPPIKDFGGFNFSQILPDPSKPSKRSFIEDLLFNKVTLADAGFIKQYGDCLGDIA
ARDLICAQKFNGLTVLPPLLTDEMIAQYTSALLAGTITCGWTFGAGACLQIPFAMQMAYRFNGIG
VTQNVLYENQKLIANQFNSAIGKIQDSLSSTASALGKLQDVVNQNAQALNTLVKQLSSNFGAISS
VLNDILSRLDKVEAEVQIDRLITGRLQSLQTYVTQQLIRAAEIRASANLAATKMSECVLGQSKRV
DFCGKGYHLMSFPQSAPHGVVFLHVTYVPAQEKNFTTAPAICHDGKAHFPREGVFVSNGTHWFVT
QRNFYEPQIITTDNTFVSGNCDVVIGIVNNTVYDPLQPELDSFKEELDKYFKNHTSPDVDLGDIS
GINASVVNIQKEIDRLNEVAKNLNESLIDLQELGKYEQGSGYIPEAPRDGQAYVRKDGEWVLLST
FLGRSLEVLFQGPGSLPETGGGSDYKDDDDKGGGGSGGGGSGGGGSGGGGSGGGGSHHHHHH
SEQ ID NO 12: SEQ ID NO 3 + A942P
MFVFLVLLPLVSSQCVNLTTRTQLPPAYTNSFTRGVYYPDKVFRSSVLHSTQDLFLPFFSNVTWF
HAIHVSGTNGTKRFDNPVLPFNDGVYFASTEKSNIIRGWIFGTTLDSKTQSLLIVNNATNVVIKV
CEFQFCNDPFLGVYYHKNNKSWMESEFRVYSSANNCTFEYVSQPFLMDLEGKQGNFKNLREFVFK
NIDGYFKIYSKHTPINLVRDLPQGFSALEPLVDLPIGINITRFQTLLALHRSYLTPGDSSSGWTA
GAAAYYVGYLQPRTFLLKYNENGTITDAVDCALDPLSETKCTLKSFTVEKGIYQTSNFRVQPTES
IVRFPNITNLCPFGEVFNATRFASVYAWNRKRISNCVADYSVLYNSASFSTFKCYGVSPTKLNDL
CFTNVYADSFVIRGDEVRQIAPGQTGKIADYNYKLPDDFTGCVIAWNSNNLDSKVGGNYNYLYRL
FRKSNLKPFERDISTEIYQAGSTPCNGVEGFNCYFPLQSYGFQPTNGVGYQPYRVVVLSFELLHA
PATVCGPKKSTNLVKNKCVNFNFNGLTGTGVLTESNKKFLPFQQFGRDIADTTDAVRDPQTLEIL
DITPCSFGGVSVITPGTNTSNQVAVLYQDVNCTEVPVAIHADQLTPTWRVYSTGSNVFQTRAGCL
IGAEHVNNSYECDIPIGAGICASYQTQTNSPSRAGSVASQSIIAYTMSLGAENSVAYSNNSIAIP
TNFTISVTTEILPVSMTKTSVDCTMYICGDSTECSNLLLQYGSFCTQLNRALTGIAVEQDKNTQE
VFAQVKQIYKTPPIKDFGGFNFSQILPDPSKPSKRSFIEDLLFNKVTLADAGFIKQYGDCLGDIA
ARDLICAQKFNGLTVLPPLLTDEMIAQYTSALLAGTITSGWTFGAGAALQIPFAMQMAYRFNGIG
VTQNVLYENQKLIANQFNSAIGKIQDSLSSTPSALGKLQDVVNQNAQALNTLVKQLSSNFGAISS
VLNDILSRLDPPEAEVQIDRLITGRLQSLQTYVTQQLIRAAEIRASANLAATKMSECVLGQSKRV
DFCGKGYHLMSFPQSAPHGVVFLHVTYVPAQEKNFTTAPAICHDGKAHFPREGVFVSNGTHWFVT
QRNFYEPQIITTDNTFVSGNCDVVIGIVNNTVYDPLQPELDSFKEELDKYFKNHTSPDVDLGDIS
GINASVVNIQKEIDRLNEVAKNLNESLIDLQELGKYEQGSGYIPEAPRDGQAYVRKDGEWVLLST
FLGRSLEVLFQGPGSLPETGGGSDYKDDDDKGGGGSGGGGGGGGSGGGGSGGGGSHHHHHH
SEQ ID NO 13: SEQ ID NO 3 + A892P
MFVFLVLLPLVSSQCVNLTTRTQLPPAYTNSFTRGVYYPDKVFRSSVLHSTQDLFLPFFSNVTWF
HAIHVSGTNGTKRFDNPVLPFNDGVYFASTEKSNIIRGWIFGTTLDSKTQSLLIVNNATNVVIKV
CEFQFCNDPFLGVYYHKNNKSWMESEFRVYSSANNCTFEYVSQPFLMDLEGKQGNFKNLREFVFK
NIDGYFKIYSKHTPINLVRDLPQGFSALEPLVDLPIGINITRFQTLLALHRSYLTPGDSSSGWTA
GAAAYYVGYLQPRTFLLKYNENGTITDAVDCALDPLSETKCTLKSFTVEKGIYQTSNFRVQPTES
IVRFPNITNLCPFGEVFNATRFASVYAWNRKRISNCVADYSVLYNSASFSTFKCYGVSPTKLNDL
CFTNVYADSFVIRGDEVRQIAPGQTGKIADYNYKLPDDFTGCVIAWNSNNLDSKVGGNYNYLYRL
FRKSNLKPFERDISTEIYQAGSTPCNGVEGFNCYFPLQSYGFQPTNGVGYQPYRVVVLSFELLHA
PATVCGPKKSTNLVKNKCVNFNFNGLTGTGVLTESNKKFLPFQQFGRDIADTTDAVRDPQTLEIL
DITPCSFGGVSVITPGTNTSNQVAVLYQDVNCTEVPVAIHADQLTPTWRVYSTGSNVFQTRAGCL
IGAEHVNNSYECDIPIGAGICASYQTQTNSPSRAGSVASQSIIAYTMSLGAENSVAYSNNSIAIP
TNFTISVTTEILPVSMTKTSVDCTMYICGDSTECSNLLLQYGSFCTQLNRALTGIAVEQDKNTQE
VFAQVKQIYKTPPIKDFGGFNFSQILPDPSKPSKRSFIEDLLFNKVTLADAGFIKQYGDCLGDIA
ARDLICAQKFNGLTVLPPLLTDEMIAQYTSALLAGTITSGWTFGAGPALQIPFAMQMAYRFNGIG
VTQNVLYENQKLIANQFNSAIGKIQDSLSSTASALGKLQDVVNQNAQALNTLVKQLSSNFGAISS
VLNDILSRLDPPEAEVQIDRLITGRLQSLQTYVTQQLIRAAEIRASANLAATKMSECVLGQSKRV
DFCGKGYHLMSFPQSAPHGVVFLHVTYVPAQEKNFTTAPAICHDGKAHFPREGVFVSNGTHWFVT
QRNFYEPQIITTDNTFVSGNCDVVIGIVNNTVYDPLQPELDSFKEELDKYFKNHTSPDVDLGDIS
GINASVVNIQKEIDRLNEVAKNLNESLIDLQELGKYEQGSGYIPEAPRDGQAYVRKDGEWVLLST
FLGRSLEVLFQGPGSLPETGGGSDYKDDDDKGGGGSGGGGSGGGGGGGGSGGGGSHHHHHH
SEQ ID NO 14: SEQ ID NO 3 + D614N
MFVFLVLLPLVSSQCVNLTTRTQLPPAYTNSFTRGVYYPDKVFRSSVLHSTQDLFLPFFSNVTWF
HAIHVSGTNGTKRFDNPVLPFNDGVYFASTEKSNIIRGWIFGTTLDSKTQSLLIVNNATNVVIKV
CEFQFCNDPFLGVYYHKNNKSWMESEFRVYSSANNCTFEYVSQPFLMDLEGKQGNFKNLREFVFK
NIDGYFKIYSKHTPINLVRDLPQGFSALEPLVDLPIGINITRFQTLLALHRSYLTPGDSSSGWTA
GAAAYYVGYLQPRTFLLKYNENGTITDAVDCALDPLSETKCTLKSFTVEKGIYQTSNFRVQPTES
IVRFPNITNLCPFGEVFNATRFASVYAWNRKRISNCVADYSVLYNSASFSTFKCYGVSPTKLNDL
CFTNVYADSFVIRGDEVRQIAPGQTGKIADYNYKLPDDFTGCVIAWNSNNLDSKVGGNYNYLYRL
FRKSNLKPFERDISTEIYQAGSTPCNGVEGFNCYFPLQSYGFQPTNGVGYQPYRVVVLSFELLHA
PATVCGPKKSTNLVKNKCVNFNFNGLTGTGVLTESNKKFLPFQQFGRDIADTTDAVRDPQTLEIL
DITPCSFGGVSVITPGTNTSNQVAVLYQNVNCTEVPVAIHADQLTPTWRVYSTGSNVFQTRAGCL
IGAEHVNNSYECDIPIGAGICASYQTQTNSPSRAGSVASQSIIAYTMSLGAENSVAYSNNSIAIP
TNFTISVTTEILPVSMTKTSVDCTMYICGDSTECSNLLLQYGSFCTQLNRALTGIAVEQDKNTQE
VFAQVKQIYKTPPIKDFGGFNFSQILPDPSKPSKRSFIEDLLFNKVTLADAGFIKQYGDCLGDIA
ARDLICAQKFNGLTVLPPLLTDEMIAQYTSALLAGTITSGWTFGAGAALQIPFAMQMAYRFNGIG
VTQNVLYENQKLIANQFNSAIGKIQDSLSSTASALGKLQDVVNQNAQALNTLVKQLSSNFGAISS
VLNDILSRLDPPEAEVQIDRLITGRLQSLQTYVTQQLIRAAEIRASANLAATKMSECVLGQSKRV
DFCGKGYHLMSFPQSAPHGVVFLHVTYVPAQEKNFTTAPAICHDGKAHFPREGVFVSNGTHWFVT
QRNFYEPQIITTDNTFVSGNCDVVIGIVNNTVYDPLQPELDSFKEELDKYFKNHTSPDVDLGDIS
GINASVVNIQKEIDRLNEVAKNLNESLIDLQELGKYEQGSGYIPEAPRDGQAYVRKDGEWVLLST
FLGRSLEVLFQGPGSLPETGGGSDYKDDDDKGGGGSGGGGSGGGGSGGGGSGGGGSHHHHHH
SEQ ID NO 15: SEQ ID NO 3 + T572I
MFVFLVLLPLVSSQCVNLTTRTQLPPAYTNSFTRGVYYPDKVFRSSVLHSTQDLFLPFFSNVTWF
HAIHVSGTNGTKRFDNPVLPFNDGVYFASTEKSNIIRGWIFGTTLDSKTQSLLIVNNATNVVIKV
CEFQFCNDPFLGVYYHKNNKSWMESEFRVYSSANNCTFEYVSQPFLMDLEGKQGNFKNLREFVFK
NIDGYFKIYSKHTPINLVRDLPQGFSALEPLVDLPIGINITRFQTLLALHRSYLTPGDSSSGWTA
GAAAYYVGYLQPRTFLLKYNENGTITDAVDCALDPLSETKCTLKSFTVEKGIYQTSNFRVQPTES
IVRFPNITNLCPFGEVFNATRFASVYAWNRKRISNCVADYSVLYNSASFSTFKCYGVSPTKLNDL
CFTNVYADSFVIRGDEVRQIAPGQTGKIADYNYKLPDDFTGCVIAWNSNNLDSKVGGNYNYLYRL
FRKSNLKPFERDISTEIYQAGSTPCNGVEGFNCYFPLQSYGFQPTNGVGYQPYRVVVLSFELLHA
PATVCGPKKSTNLVKNKCVNFNFNGLTGTGVLTESNKKFLPFQQFGRDIADITDAVRDPQTLEIL
DITPCSFGGVSVITPGTNTSNQVAVLYQDVNCTEVPVAIHADQLTPTWRVYSTGSNVFQTRAGCL
IGAEHVNNSYECDIPIGAGICASYQTQTNSPSRAGSVASQSIIAYTMSLGAENSVAYSNNSIAIP
TNFTISVTTEILPVSMTKTSVDCTMYICGDSTECSNLLLQYGSFCTQLNRALTGIAVEQDKNTQE
VFAQVKQIYKTPPIKDFGGFNFSQILPDPSKPSKRSFIEDLLFNKVTLADAGFIKQYGDCLGDIA
ARDLICAQKENGLTVLPPLLTDEMIAQYTSALLAGTITSGWTFGAGAALQIPFAMQMAYRFNGIG
VTQNVLYENQKLIANQFNSAIGKIQDSLSSTASALGKLQDVVNQNAQALNTLVKQLSSNFGAISS
VLNDILSRLDPPEAEVQIDRLITGRLQSLQTYVTQQLIRAAEIRASANLAATKMSECVLGQSKRV
DFCGKGYHLMSFPQSAPHGVVFLHVTYVPAQEKNFTTAPAICHDGKAHFPREGVFVSNGTHWFVT
QRNFYEPQIITTDNTFVSGNCDVVIGIVNNTVYDPLQPELDSFKEELDKYFKNHTSPDVDLGDIS
GINASVVNIQKEIDRLNEVAKNLNESLIDLQELGKYEQGSGYIPEAPRDGQAYVRKDGEWVLLST
FLGRSLEVLFQGPGSLPETGGGSDYKDDDDKGGGGSGGGGSGGGGSGGGGSGGGGSHHHHHH
SEQ ID NO 16: SEQ ID NO 3 + N532P
MFVFLVLLPLVSSQCVNLTTRTQLPPAYTNSFTRGVYYPDKVFRSSVLHSTQDLFLPFFSNVTWF
HAIHVSGTNGTKRFDNPVLPFNDGVYFASTEKSNIIRGWIFGTTLDSKTQSLLIVNNATNVVIKV
CEFQFCNDPFLGVYYHKNNKSWMESEFRVYSSANNCTFEYVSQPFLMDLEGKQGNFKNLREFVFK
NIDGYFKIYSKHTPINLVRDLPQGFSALEPLVDLPIGINITRFQTLLALHRSYLTPGDSSSGWTA
GAAAYYVGYLQPRTFLLKYNENGTITDAVDCALDPLSETKCTLKSFTVEKGIYQTSNFRVQPTES
IVRFPNITNLCPFGEVFNATRFASVYAWNRKRISNCVADYSVLYNSASFSTFKCYGVSPTKLNDL
CFTNVYADSFVIRGDEVRQIAPGQTGKIADYNYKLPDDFTGCVIAWNSNNLDSKVGGNYNYLYRL
FRKSNLKPFERDISTEIYQAGSTPCNGVEGFNCYFPLQSYGFQPTNGVGYQPYRVVVLSFELLHA
PATVCGPKKSTPLVKNKCVNFNFNGLTGTGVLTESNKKFLPFQQFGRDIADTTDAVRDPQTLEIL
DITPCSFGGVSVITPGTNTSNQVAVLYQDVNCTEVPVAIHADQLTPTWRVYSTGSNVFQTRAGCL
IGAEHVNNSYECDIPIGAGICASYQTQTNSPSRAGSVASQSIIAYTMSLGAENSVAYSNNSIAIP
TNFTISVTTEILPVSMTKTSVDCTMYICGDSTECSNLLLQYGSFCTQLNRALTGIAVEQDKNTQE
VFAQVKQIYKTPPIKDFGGFNFSQILPDPSKPSKRSFIEDLLFNKVTLADAGFIKQYGDCLGDIA
ARDLICAQKFNGLTVLPPLLTDEMIAQYTSALLAGTITSGWTFGAGAALQIPFAMQMAYRFNGIGV
TQNVLYENQ
KLIANQFNSAIGKIQDSLSSTASALGKLQDVVNQNAQALNTLVKQLSSNFGAISSVLNDILSRLD
PPEAEVQIDRLITGRLQSLQTYVTQQLIRAAEIRASANLAATKMSECVLGQSKRVDFCGKGYHLM
SFPQSAPHGVVFLHVTYVPAQEKNFTTAPAICHDGKAHFPREGVFVSNGTHWFVTQRNFYEPQII
TTDNTFVSGNCDVVIGIVNNTVYDPLQPELDSFKEELDKYFKNHTSPDVDLGDISGINASVVNIQ
KEIDRLNEVAKNLNESLIDLQELGKYEQGSGYIPEAPRDGQAYVRKDGEWVLLSTFLGRSLEVLF
QGPGSLPETGGGSDYKDDDDKGGGGSGGGGSGGGGSGGGGSGGGGSHHHHHH
SEQ ID NO 17: SEQ ID NO 3 + G880C + F888C
MFVFLVLLPLVSSQCVNLTTRTQLPPAYTNSFTRGVYYPDKVFRSSVLHSTQDLFLPFFSNVTWF
HAIHVSGTNGTKRFDNPVLPFNDGVYFASTEKSNIIRGWIFGTTLDSKTQSLLIVNNATNVVIKV
CEFQFCNDPFLGVYYHKNNKSWMESEFRVYSSANNCTFEYVSQPFLMDLEGKQGNFKNLREFVFK
NIDGYFKIYSKHTPINLVRDLPQGFSALEPLVDLPIGINITRFQTLLALHRSYLTPGDSSSGWTA
GAAAYYVGYLQPRTFLLKYNENGTITDAVDCALDPLSETKCTLKSFTVEKGIYQTSNFRVQPTES
IVRFPNITNLCPFGEVFNATRFASVYAWNRKRISNCVADYSVLYNSASFSTFKCYGVSPTKLNDL
CFTNVYADSFVIRGDEVRQIAPGQTGKIADYNYKLPDDFTGCVIAWNSNNLDSKVGGNYNYLYRL
FRKSNLKPFERDISTEIYQAGSTPCNGVEGFNCYFPLQSYGFQPTNGVGYQPYRVVVLSFELLHA
PATVCGPKKSTNLVKNKCVNFNFNGLTGTGVLTESNKKFLPFQQFGRDIADTTDAVRDPQTLEIL
DITPCSFGGVSVITPGTNTSNQVAVLYQDVNCTEVPVAIHADQLTPTWRVYSTGSNVFQTRAGCL
IGAEHVNNSYECDIPIGAGICASYQTQTNSPSRAGSVASQSIIAYTMSLGAENSVAYSNNSIAIP
TNFTISVTTEILPVSMTKTSVDCTMYICGDSTECSNLLLQYGSFCTQLNRALTGIAVEQDKNTQE
VFAQVKQIYKTPPIKDFGGFNFSQILPDPSKPSKRSFIEDLLFNKVTLADAGFIKQYGDCLGDIA
ARDLICAQKFNGLTVLPPLLTDEMIAQYTSALLACTITSGWTCGAGAALQIPFAMQMAYRFNGIG
VTQNVLYENQKLIANQFNSAIGKIQDSLSSTASALGKLQDVVNQNAQALNTLVKQLSSNFGAISS
VLNDILSRLDPPEAEVQIDRLITGRLQSLQTYVTQQLIRAAEIRASANLAATKMSECVLGQSKRV
DFCGKGYHLMSFPQSAPHGVVFLHVTYVPAQEKNFTTAPAICHDGKAHFPREGVFVSNGTHWFVT
QRNFYEPQIITTDNTFVSGNCDVVIGIVNNTVYDPLQPELDSFKEELDKYFKNHTSPDVDLGDIS
GINASVVNIQKEIDRLNEVAKNLNESLIDLQELGKYEQGSGYIPEAPRDGQAYVRKDGEWVLLST
FLGRSLEVLFQGPGSLPETGGGSDYKDDDDKGGGGSGGGGSGGGGSGGGGGGGGSHHHHHH
SEQ ID NO 18: SEQ ID NO 3 + S884C + A893C
MFVFLVLLPLVSSQCVNLTTRTQLPPAYTNSFTRGVYYPDKVFRSSVLHSTQDLFLPFFSNVTWF
HAIHVSGTNGTKRFDNPVLPFNDGVYFASTEKSNIIRGWIFGTTLDSKTQSLLIVNNATNVVIKV
CEFQFCNDPFLGVYYHKNNKSWMESEFRVYSSANNCTFEYVSQPFLMDLEGKQGNFKNLREFVFK
NIDGYFKIYSKHTPINLVRDLPQGFSALEPLVDLPIGINITRFQTLLALHRSYLTPGDSSSGWTA
GAAAYYVGYLQPRTFLLKYNENGTITDAVDCALDPLSETKCTLKSFTVEKGIYQTSNFRVQPTES
IVRFPNITNLCPFGEVFNATRFASVYAWNRKRISNCVADYSVLYNSASFSTFKCYGVSPTKLNDL
CFTNVYADSFVIRGDEVRQIAPGQTGKIADYNYKLPDDFTGCVIAWNSNNLDSKVGGNYNYLYRL
FRKSNLKPFERDISTEIYQAGSTPCNGVEGFNCYFPLQSYGFQPTNGVGYQPYRVVVLSFELLHA
PATVCGPKKSTNLVKNKCVNFNFNGLTGTGVLTESNKKFLPFQQFGRDIADTTDAVRDPQTLEIL
DITPCSFGGVSVITPGTNTSNQVAVLYQDVNCTEVPVAIHADQLTPTWRVYSTGSNVFQTRAGCL
IGAEHVNNSYECDIPIGAGICASYQTQTNSPSRAGSVASQSIIAYTMSLGAENSVAYSNNSIAIP
TNFTISVTTEILPVSMTKTSVDCTMYICGDSTECSNLLLQYGSFCTQLNRALTGIAVEQDKNTQE
VFAQVKQIYKTPPIKDFGGFNFSQILPDPSKPSKRSFIEDLLFNKVTLADAGFIKQYGDCLGDIA
ARDLICAQKFNGLTVLPPLLTDEMIAQYTSALLAGTITCGWTFGAGACLQIPFAMQMAYRFNGIG
VTQNVLYENQKLIANQFNSAIGKIQDSLSSTASALGKLQDVVNQNAQALNTLVKQLSSNFGAISS
VLNDILSRLDPPEAEVQIDRLITGRLQSLQTYVTQQLIRAAEIRASANLAATKMSECVLGQSKRV
DFCGKGYHLMSFPQSAPHGVVFLHVTYVPAQEKNFTTAPAICHDGKAHFPREGVFVSNGTHWFVT
QRNFYEPQIITTDNTFVSGNCDVVIGIVNNTVYDPLQPELDSFKEELDKYFKNHTSPDVDLGDIS
GINASVVNIQKEIDRLNEVAKNLNESLIDLQELGKYEQGSGYIPEAPRDGQAYVRKDGEWVLLST
FLGRSLEVLFQGPGSLPETGGGSDYKDDDDKGGGGSGGGGSGGGGSGGGGSGGGGSHHHHHH
SEQ ID NO 19: SEQ ID NO 2 + A942P + A892P
MFVFLVLLPLVSSQCVNLTTRTQLPPAYTNSFTRGVYYPDKVFRSSVLHSTQDLFLPFFSNVTWF
HAIHVSGTNGTKRFDNPVLPFNDGVYFASTEKSNIIRGWIFGTTLDSKTQSLLIVNNATNVVIKV
CEFQFCNDPFLGVYYHKNNKSWMESEFRVYSSANNCTFEYVSQPFLMDLEGKQGNFKNLREFVFK
NIDGYFKIYSKHTPINLVRDLPQGFSALEPLVDLPIGINITRFQTLLALHRSYLTPGDSSSGWTA
GAAAYYVGYLQPRTFLLKYNENGTITDAVDCALDPLSETKCTLKSFTVEKGIYQTSNFRVQPTES
IVRFPNITNLCPFGEVFNATRFASVYAWNRKRISNCVADYSVLYNSASFSTFKCYGVSPTKLNDL
CFTNVYADSFVIRGDEVRQIAPGQTGKIADYNYKLPDDFTGCVIAWNSNNLDSKVGGNYNYLYRL
FRKSNLKPFERDISTEIYQAGSTPCNGVEGFNCYFPLQSYGFQPTNGVGYQPYRVVVLSFELLHA
PATVCGPKKSTNLVKNKCVNFNFNGLTGTGVLTESNKKFLPFQQFGRDIADTTDAVRDPQTLEIL
DITPCSFGGVSVITPGTNTSNQVAVLYQDVNCTEVPVAIHADQLTPTWRVYSTGSNVFQTRAGCL
IGAEHVNNSYECDIPIGAGICASYQTQTNSPSRAGSVASQSIIAYTMSLGAENSVAYSNNSIAIP
TNFTISVTTEILPVSMTKTSVDCTMYICGDSTECSNLLLQYGSFCTQLNRALTGIAVEQDKNTQE
VFAQVKQIYKTPPIKDFGGFNFSQILPDPSKPSKRSFIEDLLFNKVTLADAGFIKQYGDCLGDIA
ARDLICAQKFNGLTVLPPLLTDEMIAQYTSALLAGTITSGWTFGAGPALQIPFAMQMAYRFNGIG
VTQNVLYENQKLIANQFNSAIGKIQDSLSSTPSALGKLQDVVNQNAQALNTLVKQLSSNFGAISS
VLNDILSRLDKVEAEVQIDRLITGRLQSLQTYVTQQLIRAAEIRASANLAATKMSECVLGQSKRV
DFCGKGYHLMSFPQSAPHGVVFLHVTYVPAQEKNFTTAPAICHDGKAHFPREGVFVSNGTHWFVT
QRNFYEPQIITTDNTFVSGNCDVVIGIVNNTVYDPLQPELDSFKEELDKYFKNHTSPDVDLGDIS
GINASVVNIQKEIDRLNEVAKNLNESLIDLQELGKYEQGSGYIPEAPRDGQAYVRKDGEWVLLST
FLGRSLEVLFQGPGSLPETGGGSDYKDDDDKGGGGGGGGSGGGGSGGGGSGGGGSHHHHHH
SEQ ID NO 20: SEQ ID NO 2 + A942P + D614N
MFVFLVLLPLVSSQCVNLTTRTQLPPAYTNSFTRGVYYPDKVFRSSVLHSTQDLFLPFFSNVTWF
HAIHVSGTNGTKRFDNPVLPFNDGVYFASTEKSNIIRGWIFGTTLDSKTQSLLIVNNATNVVIKV
CEFQFCNDPFLGVYYHKNNKSWMESEFRVYSSANNCTFEYVSQPFLMDLEGKQGNFKNLREFVFK
NIDGYFKIYSKHTPINLVRDLPQGFSALEPLVDLPIGINITRFQTLLALHRSYLTPGDSSSGWTA
GAAAYYVGYLQPRTFLLKYNENGTITDAVDCALDPLSETKCTLKSFTVEKGIYQTSNFRVQPTES
IVRFPNITNLCPFGEVFNATRFASVYAWNRKRISNCVADYSVLYNSASFSTFKCYGVSPTKLNDL
CFTNVYADSFVIRGDEVRQIAPGQTGKIADYNYKLPDDFTGCVIAWNSNNLDSKVGGNYNYLYRL
FRKSNLKPFERDISTEIYQAGSTPCNGVEGFNCYFPLQSYGFQPTNGVGYQPYRVVVLSFELLHA
PATVCGPKKSTNLVKNKCVNFNFNGLTGTGVLTESNKKFLPFQQFGRDIADTTDAVRDPQTLEIL
DITPCSFGGVSVITPGTNTSNQVAVLYQNVNCTEVPVAIHADQLTPTWRVYSTGSNVFQTRAGCL
IGAEHVNNSYECDIPIGAGICASYQTQTNSPSRAGSVASQSIIAYTMSLGAENSVAYSNNSIAIP
TNFTISVTTEILPVSMTKTSVDCTMYICGDSTECSNLLLQYGSFCTQLNRALTGIAVEQDKNTQE
VFAQVKQIYKTPPIKDFGGFNFSQILPDPSKPSKRSFIEDLLFNKVTLADAGFIKQYGDCLGDIA
ARDLICAQKFNGLTVLPPLLTDEMIAQYTSALLAGTITSGWTFGAGAALQIPFAMQMAYRFNGIG
VTQNVLYENQKLIANQFNSAIGKIQDSLSSTPSALGKLQDVVNQNAQALNTLVKQLSSNFGAISS
VLNDILSRLDKVEAEVQIDRLITGRLQSLQTYVTQQLIRAAEIRASANLAATKMSECVLGQSKRV
DFCGKGYHLMSFPQSAPHGVVFLHVTYVPAQEKNFTTAPAICHDGKAHFPREGVFVSNGTHWFVT
QRNFYEPQIITTDNTFVSGNCDVVIGIVNNTVYDPLQPELDSFKEELDKYFKNHTSPDVDLGDIS
GINASVVNIQKEIDRLNEVAKNLNESLIDLQELGKYEQGSGYIPEAPRDGQAYVRKDGEWVLLST
FLGRSLEVLFQGPGSLPETGGGSDYKDDDDKGGGGSGGGGSGGGGSGGGGSGGGGSHHHHHH
SEQ ID NO 21: SEQ ID NO 2 + A942P + T572I
MFVFLVLLPLVSSQCVNLTTRTQLPPAYTNSFTRGVYYPDKVFRSSVLHSTQDLFLPFFSNVTWF
HAIHVSGTNGTKRFDNPVLPFNDGVYFASTEKSNIIRGWIFGTTLDSKTQSLLIVNNATNVVIKV
CEFQFCNDPFLGVYYHKNNKSWMESEFRVYSSANNCTFEYVSQPFLMDLEGKQGNFKNLREFVFK
NIDGYFKIYSKHTPINLVRDLPQGFSALEPLVDLPIGINITRFQTLLALHRSYLTPGDSSSGWTA
GAAAYYVGYLQPRTFLLKYNENGTITDAVDCALDPLSETKCTLKSFTVEKGIYQTSNFRVQPTES
IVRFPNITNLCPFGEVFNATRFASVYAWNRKRISNCVADYSVLYNSASFSTFKCYGVSPTKLNDL
CFTNVYADSFVIRGDEVRQIAPGQTGKIADYNYKLPDDFTGCVIAWNSNNLDSKVGGNYNYLYRL
FRKSNLKPFERDISTEIYQAGSTPCNGVEGFNCYFPLQSYGFQPTNGVGYQPYRVVVLSFELLHA
PATVCGPKKSTNLVKNKCVNFNFNGLTGTGVLTESNKKFLPFQQFGRDIADITDAVRDPQTLEIL
DITPCSFGGVSVITPGTNTSNQVAVLYQDVNCTEVPVAIHADQLTPTWRVYSTGSNVFQTRAGCL
IGAEHVNNSYECDIPIGAGICASYQTQTNSPSRAGSVASQSIIAYTMSLGAENSVAYSNNSIAIP
TNFTISVTTEILPVSMTKTSVDCTMYICGDSTECSNLLLQYGSFCTQLNRALTGIAVEQDKNTQE
VFAQVKQIYKTPPIKDFGGFNFSQILPDPSKPSKRSFIEDLLFNKVTLADAGFIKQYGDCLGDIA
ARDLICAQKFNGLTVLPPLLTDEMIAQYTSALLAGTITSGWTFGAGAALQIPFAMQMAYRFNGIG
VTQNVLYENQKLIANQFNSAIGKIQDSLSSTPSALGKLQDVVNQNAQALNTLVKQLSSNFGAISS
VLNDILSRLDKVEAEVQIDRLITGRLQSLQTYVTQQLIRAAEIRASANLAATKMSECVLGQSKRV
DFCGKGYHLMSFPQSAPHGVVFLHVTYVPAQEKNFTTAPAICHDGKAHFPREGVFVSNGTHWFVT
QRNFYEPQIITTDNTFVSGNCDVVIGIVNNTVYDPLQPELDSFKEELDKYFKNHTSPDVDLGDIS
GINASVVNIQKEIDRLNEVAKNLNESLIDLQELGKYEQGSGYIPEAPRDGQAYVRKDGEWVLLST
FLGRSLEVLFQGPGSLPETGGGSDYKDDDDKGGGGSGGGGSGGGGGGGGSGGGGSHHHHHH
SEQ ID NO 22: SEQ ID NO 2 + A942P + N532P
MFVFLVLLPLVSSQCVNLTTRTQLPPAYTNSFTRGVYYPDKVFRSSVLHSTQDLFLPFFSNVTWF
HAIHVSGTNGTKRFDNPVLPFNDGVYFASTEKSNIIRGWIFGTTLDSKTQSLLIVNNATNVVIKV
CEFQFCNDPFLGVYYHKNNKSWMESEFRVYSSANNCTFEYVSQPFLMDLEGKQGNFKNLREFVFK
NIDGYFKIYSKHTPINLVRDLPQGFSALEPLVDLPIGINITRFQTLLALHRSYLTPGDSSSGWTA
GAAAYYVGYLQPRTFLLKYNENGTITDAVDCALDPLSETKCTLKSFTVEKGIYQTSNFRVQPTES
IVRFPNITNLCPFGEVFNATRFASVYAWNRKRISNCVADYSVLYNSASFSTFKCYGVSPTKLNDL
CFTNVYADSFVIRGDEVRQIAPGQTGKIADYNYKLPDDFTGCVIAWNSNNLDSKVGGNYNYLYRL
FRKSNLKPFERDISTEIYQAGSTPCNGVEGFNCYFPLQSYGFQPTNGVGYQPYRVVVLSFELLHA
PATVCGPKKSTPLVKNKCVNFNFNGLTGTGVLTESNKKFLPFQQFGRDIADTTDAVRDPQTLEIL
DITPCSFGGVSVITPGTNTSNQVAVLYQDVNCTEVPVAIHADQLTPTWRVYSTGSNVFQTRAGCL
IGAEHVNNSYECDIPIGAGICASYQTQTNSPSRAGSVASQSIIAYTMSLGAENSVAYSNNSIAIP
TNFTISVTTEILPVSMTKTSVDCTMYICGDSTECSNLLLQYGSFCTQLNRALTGIAVEQDKNTQE
VFAQVKQIYKTPPIKDFGGFNFSQILPDPSKPSKRSFIEDLLFNKVTLADAGFIKQYGDCLGDIA
ARDLICAQKFNGLTVLPPLLTDEMIAQYTSALLAGTITSGWTFGAGAALQIPFAMQMAYRFNGIG
VTQNVLYENQKLIANQFNSAIGKIQDSLSSTPSALGKLQDVVNQNAQALNTLVKQLSSNFGAISS
VLNDILSRLDKVEAEVQIDRLITGRLQSLQTYVTQQLIRAAEIRASANLAATKMSECVLGQSKRV
DFCGKGYHLMSFPQSAPHGVVFLHVTYVPAQEKNFTTAPAICHDGKAHFPREGVFVSNGTHWFVT
QRNFYEPQIITTDNTFVSGNCDVVIGIVNNTVYDPLQPELDSFKEELDKYFKNHTSPDVDLGDIS
GINASVVNIQKEIDRLNEVAKNLNESLIDLQELGKYEQGSGYIPEAPRDGQAYVRKDGEWVLLST
FLGRSLEVLFQGPGSLPETGGGSDYKDDDDKGGGGSGGGGSGGGGSGGGGSGGGGSHHHHHH
SEQ ID NO 23: SEQ ID NO 2 + A942P + G880C + F888C
MFVFLVLLPLVSSQCVNLTTRTQLPPAYTNSFTRGVYYPDKVFRSSVLHSTQDLFLPFFSNVTWF
HAIHVSGTNGTKRFDNPVLPFNDGVYFASTEKSNIIRGWIFGTTLDSKTQSLLIVNNATNVVIKV
CEFQFCNDPFLGVYYHKNNKSWMESEFRVYSSANNCTFEYVSQPFLMDLEGKQGNFKNLREFVFK
NIDGYFKIYSKHTPINLVRDLPQGFSALEPLVDLPIGINITRFQTLLALHRSYLTPGDSSSGWTA
GAAAYYVGYLQPRTFLLKYNENGTITDAVDCALDPLSETKCTLKSFTVEKGIYQTSNFRVQPTES
IVRFPNITNLCPFGEVFNATRFASVYAWNRKRISNCVADYSVLYNSASFSTFKCYGVSPTKLNDL
CFTNVYADSFVIRGDEVRQIAPGQTGKIADYNYKLPDDFTGCVIAWNSNNLDSKVGGNYNYLYRL
FRKSNLKPFERDISTEIYQAGSTPCNGVEGFNCYFPLQSYGFQPTNGVGYQPYRVVVLSFELLHA
PATVCGPKKSTNLVKNKCVNFNFNGLTGTGVLTESNKKFLPFQQFGRDIADTTDAVRDPQTLEIL
DITPCSFGGVSVITPGTNTSNQVAVLYQDVNCTEVPVAIHADQLTPTWRVYSTGSNVFQTRAGCL
IGAEHVNNSYECDIPIGAGICASYQTQTNSPSRAGSVASQSIIAYTMSLGAENSVAYSNNSIAIP
TNFTISVTTEILPVSMTKTSVDCTMYICGDSTECSNLLLQYGSFCTQLNRALTGIAVEQDKNTQE
VFAQVKQIYKTPPIKDFGGFNFSQILPDPSKPSKRSFIEDLLFNKVTLADAGFIKQYGDCLGDIA
ARDLICAQKFNGLTVLPPLLTDEMIAQYTSALLACTITSGWTCGAGAALQIPFAMQMAYRFNGIG
VTQNVLYENQKLIANQFNSAIGKIQDSLSSTPSALGKLQDVVNQNAQALNTLVKQLSSNFGAISS
VLNDILSRLDKVEAEVQIDRLITGRLQSLQTYVTQQLIRAAEIRASANLAATKMSECVLGQSKRV
DFCGKGYHLMSFPQSAPHGVVFLHVTYVPAQEKNFTTAPAICHDGKAHFPREGVFVSNGTHWFVT
QRNFYEPQIITTDNTFVSGNCDVVIGIVNNTVYDPLQPELDSFKEELDKYFKNHTSPDVDLGDIS
GINASVVNIQKEIDRLNEVAKNLNESLIDLQELGKYEQGSGYIPEAPRDGQAYVRKDGEWVLLST
FLGRSLEVLFQGPGSLPETGGGSDYKDDDDKGGGGSGGGGSGGGGSGGGGSGGGGSHHHHHH
SEQ ID NO 24: SEQ ID NO 2 + A942P + S884C + A893C
MFVFLVLLPLVSSQCVNLTTRTQLPPAYTNSFTRGVYYPDKVFRSSVLHSTQDLFLPFFSNVTWF
HAIHVSGTNGTKRFDNPVLPFNDGVYFASTEKSNIIRGWIFGTTLDSKTQSLLIVNNATNVVIKV
CEFQFCNDPFLGVYYHKNNKSWMESEFRVYSSANNCTFEYVSQPFLMDLEGKQGNFKNLREFVFK
NIDGYFKIYSKHTPINLVRDLPQGFSALEPLVDLPIGINITRFQTLLALHRSYLTPGDSSSGWTA
GAAAYYVGYLQPRTFLLKYNENGTITDAVDCALDPLSETKCTLKSFTVEKGIYQTSNFRVQPTES
IVRFPNITNLCPFGEVFNATRFASVYAWNRKRISNCVADYSVLYNSASFSTFKCYGVSPTKLNDL
CFTNVYADSFVIRGDEVRQIAPGQTGKIADYNYKLPDDFTGCVIAWNSNNLDSKVGGNYNYLYRL
FRKSNLKPFERDISTEIYQAGSTPCNGVEGFNCYFPLQSYGFQPTNGVGYQPYRVVVLSFELLHA
PATVCGPKKSTNLVKNKCVNFNFNGLTGTGVLTESNKKFLPFQQFGRDIADTTDAVRDPQTLEIL
DITPCSFGGVSVITPGTNTSNQVAVLYQDVNCTEVPVAIHADQLTPTWRVYSTGSNVFQTRAGCL
IGAEHVNNSYECDIPIGAGICASYQTQTNSPSRAGSVASQSIIAYTMSLGAENSVAYSNNSIAIP
TNFTISVTTEILPVSMTKTSVDCTMYICGDSTECSNLLLQYGSFCTQLNRALTGIAVEQDKNTQE
VFAQVKQIYKTPPIKDFGGFNFSQILPDPSKPSKRSFIEDLLFNKVTLADAGFIKQYGDCLGDIA
ARDLICAQKFNGLTVLPPLLTDEMIAQYTSALLAGTITCGWTFGAGACLQIPFAMQMAYRFNGIG
VTQNVLYENQKLIANQFNSAIGKIQDSLSSTPSALGKLQDVVNQNAQALNTLVKQLSSNFGAISS
VLNDILSRLDKVEAEVQIDRLITGRLQSLQTYVTQQLIRAAEIRASANLAATKMSECVLGQSKRV
DFCGKGYHLMSFPQSAPHGVVFLHVTYVPAQEKNFTTAPAICHDGKAHFPREGVFVSNGTHWFVT
QRNFYEPQIITTDNTFVSGNCDVVIGIVNNTVYDPLQPELDSFKEELDKYFKNHTSPDVDLGDIS
GINASVVNIQKEIDRLNEVAKNLNESLIDLQELGKYEQGSGYIPEAPRDGQAYVRKDGEWVLLST
FLGRSLEVLFQGPGSLPETGGGSDYKDDDDKGGGGSGGGGSGGGGSGGGGSGGGGSHHHHHH
SEQ ID NO 25: SEQ ID NO 2 + A892P + D614N
MFVFLVLLPLVSSQCVNLTTRTQLPPAYTNSFTRGVYYPDKVFRSSVLHSTQDLFLPFFSNVTWF
HAIHVSGTNGTKRFDNPVLPFNDGVYFASTEKSNIIRGWIFGTTLDSKTQSLLIVNNATNVVIKV
CEFQFCNDPFLGVYYHKNNKSWMESEFRVYSSANNCTFEYVSQPFLMDLEGKQGNFKNLREFVFK
NIDGYFKIYSKHTPINLVRDLPQGFSALEPLVDLPIGINITRFQTLLALHRSYLTPGDSSSGWTA
GAAAYYVGYLQPRTFLLKYNENGTITDAVDCALDPLSETKCTLKSFTVEKGIYQTSNFRVQPTES
IVRFPNITNLCPFGEVFNATRFASVYAWNRKRISNCVADYSVLYNSASFSTFKCYGVSPTKLNDL
CFTNVYADSFVIRGDEVRQIAPGQTGKIADYNYKLPDDFTGCVIAWNSNNLDSKVGGNYNYLYRL
FRKSNLKPFERDISTEIYQAGSTPCNGVEGFNCYFPLQSYGFQPTNGVGYQPYRVVVLSFELLHA
PATVCGPKKSTNLVKNKCVNFNFNGLTGTGVLTESNKKFLPFQQFGRDIADTTDAVRDPQTLEIL
DITPCSFGGVSVITPGTNTSNQVAVLYQNVNCTEVPVAIHADQLTPTWRVYSTGSNVFQTRAGCL
IGAEHVNNSYECDIPIGAGICASYQTQTNSPSRAGSVASQSIIAYTMSLGAENSVAYSNNSIAIP
TNFTISVTTEILPVSMTKTSVDCTMYICGDSTECSNLLLQYGSFCTQLNRALTGIAVEQDKNTQE
VFAQVKQIYKTPPIKDFGGFNFSQILPDPSKPSKRSFIEDLLFNKVTLADAGFIKQYGDCLGDIA
ARDLICAQKFNGLTVLPPLLTDEMIAQYTSALLAGTITSGWTFGAGPALQIPFAMQMAYRFNGIG
VTQNVLYENQKLIANQFNSAIGKIQDSLSSTASALGKLQDVVNQNAQALNTLVKQLSSNFGAISS
VLNDILSRLDKVEAEVQIDRLITGRLQSLQTYVTQQLIRAAEIRASANLAATKMSECVLGQSKRV
DFCGKGYHLMSFPQSAPHGVVFLHVTYVPAQEKNFTTAPAICHDGKAHFPREGVFVSNGTHWFVT
QRNFYEPQIITTDNTFVSGNCDVVIGIVNNTVYDPLQPELDSFKEELDKYFKNHTSPDVDLGDIS
GINASVVNIQKEIDRLNEVAKNLNESLIDLQELGKYEQGSGYIPEAPRDGQAYVRKDGEWVLLST
FLGRSLEVLFQGPGSLPETGGGSDYKDDDDKGGGGSGGGGGGGGSGGGGSGGGGSHHHHHH
SEQ ID NO 26: SEQ ID NO 2 + A892P + T572I
MFVFLVLLPLVSSQCVNLTTRTQLPPAYTNSFTRGVYYPDKVFRSSVLHSTQDLFLPFFSNVTWF
HAIHVSGTNGTKRFDNPVLPFNDGVYFASTEKSNIIRGWIFGTTLDSKTQSLLIVNNATNVVIKV
CEFQFCNDPFLGVYYHKNNKSWMESEFRVYSSANNCTFEYVSQPFLMDLEGKQGNFKNLREFVFK
NIDGYFKIYSKHTPINLVRDLPQGFSALEPLVDLPIGINITRFQTLLALHRSYLTPGDSSSGWTA
GAAAYYVGYLQPRTFLLKYNENGTITDAVDCALDPLSETKCTLKSFTVEKGIYQTSNFRVQPTES
IVRFPNITNLCPFGEVFNATRFASVYAWNRKRISNCVADYSVLYNSASFSTFKCYGVSPTKLNDL
CFTNVYADSFVIRGDEVRQIAPGQTGKIADYNYKLPDDFTGCVIAWNSNNLDSKVGGNYNYLYRL
FRKSNLKPFERDISTEIYQAGSTPCNGVEGFNCYFPLQSYGFQPTNGVGYQPYRVVVLSFELLHA
PATVCGPKKSTNLVKNKCVNFNFNGLTGTGVLTESNKKFLPFQQFGRDIADITDAVRDPQTLEIL
DITPCSFGGVSVITPGTNTSNQVAVLYQDVNCTEVPVAIHADQLTPTWRVYSTGSNVFQTRAGCL
IGAEHVNNSYECDIPIGAGICASYQTQTNSPSRAGSVASQSIIAYTMSLGAENSVAYSNNSIAIP
TNFTISVTTEILPVSMTKTSVDCTMYICGDSTECSNLLLQYGSFCTQLNRALTGIAVEQDKNTQE
VFAQVKQIYKTPPIKDFGGFNFSQILPDPSKPSKRSFIEDLLFNKVTLADAGFIKQYGDCLGDIA
ARDLICAQKFNGLTVLPPLLTDEMIAQYTSALLAGTITSGWTFGAGPALQIPFAMQMAYRFNGIG
VTQNVLYENQKLIANQFNSAIGKIQDSLSSTASALGKLQDVVNQNAQALNTLVKQLSSNFGAISS
VLNDILSRLDKVEAEVQIDRLITGRLQSLQTYVTQQLIRAAEIRASANLAATKMSECVLGQSKRV
DFCGKGYHLMSFPQSAPHGVVFLHVTYVPAQEKNFTTAPAICHDGKAHFPREGVFVSNGTHWFVT
QRNFYEPQIITTDNTFVSGNCDVVIGIVNNTVYDPLQPELDSFKEELDKYFKNHTSPDVDLGDIS
GINASVVNIQKEIDRLNEVAKNLNESLIDLQELGKYEQGSGYIPEAPRDGQAYVRKDGEWVLLST
FLGRSLEVLFQGPGSLPETGGGSDYKDDDDKGGGGGGGGSGGGGSGGGGSGGGGSHHHHHH
SEQ ID NO 27: SEQ ID NO 2 + A892P + N532P
MFVFLVLLPLVSSQCVNLTTRTQLPPAYTNSFTRGVYYPDKVFRSSVLHSTQDLFLPFFSNVTWF
HAIHVSGTNGTKRFDNPVLPFNDGVYFASTEKSNIIRGWIFGTTLDSKTQSLLIVNNATNVVIKV
CEFQFCNDPFLGVYYHKNNKSWMESEFRVYSSANNCTFEYVSQPFLMDLEGKQGNFKNLREFVFK
NIDGYFKIYSKHTPINLVRDLPQGFSALEPLVDLPIGINITRFQTLLALHRSYLTPGDSSSGWTA
GAAAYYVGYLQPRTFLLKYNENGTITDAVDCALDPLSETKCTLKSFTVEKGIYQTSNFRVQPTES
IVRFPNITNLCPFGEVFNATRFASVYAWNRKRISNCVADYSVLYNSASFSTFKCYGVSPTKLNDL
CFTNVYADSFVIRGDEVRQIAPGQTGKIADYNYKLPDDFTGCVIAWNSNNLDSKVGGNYNYLYRL
FRKSNLKPFERDISTEIYQAGSTPCNGVEGFNCYFPLQSYGFQPTNGVGYQPYRVVVLSFELLHA
PATVCGPKKSTPLVKNKCVNFNFNGLTGTGVLTESNKKFLPFQQFGRDIADTTDAVRDPQTLEIL
DITPCSFGGVSVITPGTNTSNQVAVLYQDVNCTEVPVAIHADQLTPTWRVYSTGSNVFQTRAGCL
IGAEHVNNSYECDIPIGAGICASYQTQTNSPSRAGSVASQSIIAYTMSLGAENSVAYSNNSIAIP
TNFTISVTTEILPVSMTKTSVDCTMYICGDSTECSNLLLQYGSFCTQLNRALTGIAVEQDKNTQE
VFAQVKQIYKTPPIKDFGGFNFSQILPDPSKPSKRSFIEDLLFNKVTLADAGFIKQYGDCLGDIA
ARDLICAQKFNGLTVLPPLLTDEMIAQYTSALLAGTITSGWTFGAGPALQIPFAMQMAYRFNGIG
VTQNVLYENQKLIANQFNSAIGKIQDSLSSTASALGKLQDVVNQNAQALNTLVKQLSSNFGAISS
VLNDILSRLDKVEAEVQIDRLITGRLQSLQTYVTQQLIRAAEIRASANLAATKMSECVLGQSKRV
DFCGKGYHLMSFPQSAPHGVVFLHVTYVPAQEKNFTTAPAICHDGKAHFPREGVFVSNGTHWFVT
QRNFYEPQIITTDNTFVSGNCDVVIGIVNNTVYDPLQPELDSFKEELDKYFKNHTSPDVDLGDIS
GINASVVNIQKEIDRLNEVAKNLNESLIDLQELGKYEQGSGYIPEAPRDGQAYVRKDGEWVLLST
FLGRSLEVLFQGPGSLPETGGGSDYKDDDDKGGGGSGGGGSGGGGSGGGGSGGGGSHHHHHH
SEQ ID NO 28: SEQ ID NO 2 + A892P + G880C + F888C
MFVFLVLLPLVSSQCVNLTTRTQLPPAYTNSFTRGVYYPDKVFRSSVLHSTQDLFLPFFSNVTWF
HAIHVSGTNGTKRFDNPVLPFNDGVYFASTEKSNIIRGWIFGTTLDSKTQSLLIVNNATNVVIKV
CEFQFCNDPFLGVYYHKNNKSWMESEFRVYSSANNCTFEYVSQPFLMDLEGKQGNFKNLREFVFK
NIDGYFKIYSKHTPINLVRDLPQGFSALEPLVDLPIGINITRFQTLLALHRSYLTPGDSSSGWTA
GAAAYYVGYLQPRTFLLKYNENGTITDAVDCALDPLSETKCTLKSFTVEKGIYQTSNFRVQPTES
IVRFPNITNLCPFGEVFNATRFASVYAWNRKRISNCVADYSVLYNSASFSTFKCYGVSPTKLNDL
CFTNVYADSFVIRGDEVRQIAPGQTGKIADYNYKLPDDFTGCVIAWNSNNLDSKVGGNYNYLYRL
FRKSNLKPFERDISTEIYQAGSTPCNGVEGFNCYFPLQSYGFQPTNGVGYQPYRVVVLSFELLHA
PATVCGPKKSTNLVKNKCVNFNFNGLTGTGVLTESNKKFLPFQQFGRDIADTTDAVRDPQTLEIL
DITPCSFGGVSVITPGTNTSNQVAVLYQDVNCTEVPVAIHADQLTPTWRVYSTGSNVFQTRAGCL
IGAEHVNNSYECDIPIGAGICASYQTQTNSPSRAGSVASQSIIAYTMSLGAENSVAYSNNSIAIP
TNFTISVTTEILPVSMTKTSVDCTMYICGDSTECSNLLLQYGSFCTQLNRALTGIAVEQDKNTQE
VFAQVKQIYKTPPIKDFGGFNFSQILPDPSKPSKRSFIEDLLFNKVTLADAGFIKQYGDCLGDIA
ARDLICAQKFNGLTVLPPLLTDEMIAQYTSALLACTITSGWTCGAGPALQIPFAMQMAYRFNGIG
VTQNVLYENQKLIANQFNSAIGKIQDSLSSTASALGKLQDVVNQNAQALNTLVKQLSSNFGAISS
VLNDILSRLDKVEAEVQIDRLITGRLQSLQTYVTQQLIRAAEIRASANLAATKMSECVLGQSKRV
DFCGKGYHLMSFPQSAPHGVVFLHVTYVPAQEKNFTTAPAICHDGKAHFPREGVFVSNGTHWFVT
QRNFYEPQIITTDNTFVSGNCDVVIGIVNNTVYDPLQPELDSFKEELDKYFKNHTSPDVDLGDIS
GINASVVNIQKEIDRLNEVAKNLNESLIDLQELGKYEQGSGYIPEAPRDGQAYVRKDGEWVLLST
FLGRSLEVLFQGPGSLPETGGGSDYKDDDDKGGGGSGGGGSGGGGSGGGGSGGGGSHHHHHH
SEQ ID NO 29: SEQ ID NO 2 + A892P + S884C + A893C
MFVFLVLLPLVSSQCVNLTTRTQLPPAYTNSFTRGVYYPDKVFRSSVLHSTQDLFLPFFSNVTWF
HAIHVSGTNGTKRFDNPVLPFNDGVYFASTEKSNIIRGWIFGTTLDSKTQSLLIVNNATNVVIKV
CEFQFCNDPFLGVYYHKNNKSWMESEFRVYSSANNCTFEYVSQPFLMDLEGKQGNFKNLREFVFK
NIDGYFKIYSKHTPINLVRDLPQGFSALEPLVDLPIGINITRFQTLLALHRSYLTPGDSSSGWTA
GAAAYYVGYLQPRTFLLKYNENGTITDAVDCALDPLSETKCTLKSFTVEKGIYQTSNFRVQPTES
IVRFPNITNLCPFGEVFNATRFASVYAWNRKRISNCVADYSVLYNSASFSTFKCYGVSPTKLNDL
CFTNVYADSFVIRGDEVRQIAPGQTGKIADYNYKLPDDFTGCVIAWNSNNLDSKVGGNYNYLYRL
FRKSNLKPFERDISTEIYQAGSTPCNGVEGFNCYFPLQSYGFQPTNGVGYQPYRVVVLSFELLHA
PATVCGPKKSTNLVKNKCVNFNFNGLTGTGVLTESNKKFLPFQQFGRDIADTTDAVRDPQTLEIL
DITPCSFGGVSVITPGTNTSNQVAVLYQDVNCTEVPVAIHADQLTPTWRVYSTGSNVFQTRAGCL
IGAEHVNNSYECDIPIGAGICASYQTQTNSPSRAGSVASQSIIAYTMSLGAENSVAYSNNSIAIP
TNFTISVTTEILPVSMTKTSVDCTMYICGDSTECSNLLLQYGSFCTQLNRALTGIAVEQDKNTQE
VFAQVKQIYKTPPIKDFGGFNFSQILPDPSKPSKRSFIEDLLFNKVTLADAGFIKQYGDCLGDIA
ARDLICAQKFNGLTVLPPLLTDEMIAQYTSALLAGTITCGWTFGAGPCLQIPFAMQMAYRFNGIG
VTQNVLYENQKLIANQFNSAIGKIQDSLSSTASALGKLQDVVNQNAQALNTLVKQLSSNFGAISS
VLNDILSRLDKVEAEVQIDRLITGRLQSLQTYVTQQLIRAAEIRASANLAATKMSECVLGQSKRV
DFCGKGYHLMSFPQSAPHGVVFLHVTYVPAQEKNFTTAPAICHDGKAHFPREGVFVSNGTHWFVT
QRNFYEPQIITTDNTFVSGNCDVVIGIVNNTVYDPLQPELDSFKEELDKYFKNHTSPDVDLGDIS
GINASVVNIQKEIDRLNEVAKNLNESLIDLQELGKYEQGSGYIPEAPRDGQAYVRKDGEWVLLST
FLGRSLEVLFQGPGSLPETGGGSDYKDDDDKGGGGSGGGGSGGGGSGGGGSGGGGSHHHHHH
SEQ ID NO 30: SEQ ID NO 2 + D614N + T572I
MFVFLVLLPLVSSQCVNLTTRTQLPPAYTNSFTRGVYYPDKVFRSSVLHSTQDLFLPFFSNVTWF
HAIHVSGTNGTKRFDNPVLPFNDGVYFASTEKSNIIRGWIFGTTLDSKTQSLLIVNNATNVVIKV
CEFQFCNDPFLGVYYHKNNKSWMESEFRVYSSANNCTFEYVSQPFLMDLEGKQGNFKNLREFVFK
NIDGYFKIYSKHTPINLVRDLPQGFSALEPLVDLPIGINITRFQTLLALHRSYLTPGDSSSGWTA
GAAAYYVGYLQPRTFLLKYNENGTITDAVDCALDPLSETKCTLKSFTVEKGIYQTSNFRVQPTES
IVRFPNITNLCPFGEVFNATRFASVYAWNRKRISNCVADYSVLYNSASFSTFKCYGVSPTKLNDL
CFTNVYADSFVIRGDEVRQIAPGQTGKIADYNYKLPDDFTGCVIAWNSNNLDSKVGGNYNYLYRL
FRKSNLKPFERDISTEIYQAGSTPCNGVEGFNCYFPLQSYGFQPTNGVGYQPYRVVVLSFELLHA
PATVCGPKKSTNLVKNKCVNFNFNGLTGTGVLTESNKKFLPFQQFGRDIADITDAVRDPQTLEIL
DITPCSFGGVSVITPGTNTSNQVAVLYQNVNCTEVPVAIHADQLTPTWRVYSTGSNVFQTRAGCL
IGAEHVNNSYECDIPIGAGICASYQTQTNSPSRAGSVASQSIIAYTMSLGAENSVAYSNNSIAIP
TNFTISVTTEILPVSMTKTSVDCTMYICGDSTECSNLLLQYGSFCTQLNRALTGIAVEQDKNTQE
VFAQVKQIYKTPPIKDFGGFNFSQILPDPSKPSKRSFIEDLLFNKVTLADAGFIKQYGDCLGDIA
ARDLICAQKFNGLTVLPPLLTDEMIAQYTSALLAGTITSGWTFGAGAALQIPFAMQMAYRFNGIG
VTQNVLYENQKLIANQFNSAIGKIQDSLSSTASALGKLQDVVNQNAQALNTLVKQLSSNFGAISS
VLNDILSRLDKVEAEVQIDRLITGRLQSLQTYVTQQLIRAAEIRASANLAATKMSECVLGQSKRV
DFCGKGYHLMSFPQSAPHGVVFLHVTYVPAQEKNFTTAPAICHDGKAHFPREGVFVSNGTHWFVT
QRNFYEPQIITTDNTFVSGNCDVVIGIVNNTVYDPLQPELDSFKEELDKYFKNHTSPDVDLGDIS
GINASVVNIQKEIDRLNEVAKNLNESLIDLQELGKYEQGSGYIPEAPRDGQAYVRKDGEWVLLST
FLGRSLEVLFQGPGSLPETGGGSDYKDDDDKGGGGSGGGGSGGGGSGGGGSGGGGSHHHHHH
SEQ ID NO 31: SEQ ID NO 2 + D614N + N532P
MFVFLVLLPLVSSQCVNLTTRTQLPPAYTNSFTRGVYYPDKVFRSSVLHSTQDLFLPFFSNVTWF
HAIHVSGTNGTKRFDNPVLPFNDGVYFASTEKSNIIRGWIFGTTLDSKTQSLLIVNNATNVVIKV
CEFQFCNDPFLGVYYHKNNKSWMESEFRVYSSANNCTFEYVSQPFLMDLEGKQGNFKNLREFVFK
NIDGYFKIYSKHTPINLVRDLPQGFSALEPLVDLPIGINITRFQTLLALHRSYLTPGDSSSGWTA
GAAAYYVGYLQPRTFLLKYNENGTITDAVDCALDPLSETKCTLKSFTVEKGIYQTSNFRVQPTES
IVRFPNITNLCPFGEVFNATRFASVYAWNRKRISNCVADYSVLYNSASFSTFKCYGVSPTKLNDL
CFTNVYADSFVIRGDEVRQIAPGQTGKIADYNYKLPDDFTGCVIAWNSNNLDSKVGGNYNYLYRL
FRKSNLKPFERDISTEIYQAGSTPCNGVEGFNCYFPLQSYGFQPTNGVGYQPYRVVVLSFELLHA
PATVCGPKKSTPLVKNKCVNFNFNGLTGTGVLTESNKKFLPFQQFGRDIADTTDAVRDPQTLEIL
DITPCSFGGVSVITPGTNTSNQVAVLYQNVNCTEVPVAIHADQLTPTWRVYSTGSNVFQTRAGCL
IGAEHVNNSYECDIPIGAGICASYQTQTNSPSRAGSVASQSIIAYTMSLGAENSVAYSNNSIAIP
TNFTISVTTEILPVSMTKTSVDCTMYICGDSTECSNLLLQYGSFCTQLNRALTGIAVEQDKNTQE
VFAQVKQIYKTPPIKDFGGFNFSQILPDPSKPSKRSFIEDLLFNKVTLADAGFIKQYGDCLGDIA
ARDLICAQKFNGLTVLPPLLTDEMIAQYTSALLAGTITSGWTFGAGAALQIPFAMQMAYRFNGIG
VTQNVLYENQKLIANQFNSAIGKIQDSLSSTASALGKLQDVVNQNAQALNTLVKQLSSNFGAISS
VLNDILSRLDKVEAEVQIDRLITGRLQSLQTYVTQQLIRAAEIRASANLAATKMSECVLGQSKRV
DFCGKGYHLMSFPQSAPHGVVFLHVTYVPAQEKNFTTAPAICHDGKAHFPREGVFVSNGTHWFVT
QRNFYEPQIITTDNTFVSGNCDVVIGIVNNTVYDPLQPELDSFKEELDKYFKNHTSPDVDLGDIS
GINASVVNIQKEIDRLNEVAKNLNESLIDLQELGKYEQGSGYIPEAPRDGQAYVRKDGEWVLLST
FLGRSLEVLFQGPGSLPETGGGSDYKDDDDKGGGGSGGGGSGGGGSGGGGSGGGGSHHHHHH
SEQ ID NO 32: SEQ ID NO 2 + D614N + G880C + F888C
MFVFLVLLPLVSSQCVNLTTRTQLPPAYTNSFTRGVYYPDKVFRSSVLHSTQDLFLPFFSNVTWF
HAIHVSGTNGTKRFDNPVLPFNDGVYFASTEKSNIIRGWIFGTTLDSKTQSLLIVNNATNVVIKV
CEFQFCNDPFLGVYYHKNNKSWMESEFRVYSSANNCTFEYVSQPFLMDLEGKQGNFKNLREFVFK
NIDGYFKIYSKHTPINLVRDLPQGFSALEPLVDLPIGINITRFQTLLALHRSYLTPGDSSSGWTA
GAAAYYVGYLQPRTFLLKYNENGTITDAVDCALDPLSETKCTLKSFTVEKGIYQTSNFRVQPTES
IVRFPNITNLCPFGEVFNATRFASVYAWNRKRISNCVADYSVLYNSASFSTFKCYGVSPTKLNDL
CFTNVYADSFVIRGDEVRQIAPGQTGKIADYNYKLPDDFTGCVIAWNSNNLDSKVGGNYNYLYRL
FRKSNLKPFERDISTEIYQAGSTPCNGVEGFNCYFPLQSYGFQPTNGVGYQPYRVVVLSFELLHA
PATVCGPKKSTNLVKNKCVNFNFNGLTGTGVLTESNKKFLPFQQFGRDIADTTDAVRDPQTLEIL
DITPCSFGGVSVITPGTNTSNQVAVLYQNVNCTEVPVAIHADQLTPTWRVYSTGSNVFQTRAGCL
IGAEHVNNSYECDIPIGAGICASYQTQTNSPSRAGSVASQSIIAYTMSLGAENSVAYSNNSIAIP
TNFTISVTTEILPVSMTKTSVDCTMYICGDSTECSNLLLQYGSFCTQLNRALTGIAVEQDKNTQE
VFAQVKQIYKTPPIKDFGGFNFSQILPDPSKPSKRSFIEDLLFNKVTLADAGFIKQYGDCLGDIA
ARDLICAQKFNGLTVLPPLLTDEMIAQYTSALLACTITSGWTCGAGAALQIPFAMQMAYRFNGIG
VTQNVLYENQKLIANQFNSAIGKIQDSLSSTASALGKLQDVVNQNAQALNTLVKQLSSNFGAISS
VLNDILSRLDKVEAEVQIDRLITGRLQSLQTYVTQQLIRAAEIRASANLAATKMSECVLGQSKRV
DFCGKGYHLMSFPQSAPHGVVFLHVTYVPAQEKNFTTAPAICHDGKAHFPREGVFVSNGTHWFVT
QRNFYEPQIITTDNTFVSGNCDVVIGIVNNTVYDPLQPELDSFKEELDKYFKNHTSPDVDLGDIS
GINASVVNIQKEIDRLNEVAKNLNESLIDLQELGKYEQGSGYIPEAPRDGQAYVRKDGEWVLLST
FLGRSLEVLFQGPGSLPETGGGSDYKDDDDKGGGGSGGGGSGGGGSGGGGSGGGGSHHHHHH
SEQ ID NO 33: SEQ ID NO 2 + D614N + S884C + A893C
MFVFLVLLPLVSSQCVNLTTRTQLPPAYTNSFTRGVYYPDKVFRSSVLHSTQDLFLPFFSNVTWF
HAIHVSGTNGTKRFDNPVLPFNDGVYFASTEKSNIIRGWIFGTTLDSKTQSLLIVNNATNVVIKV
CEFQFCNDPFLGVYYHKNNKSWMESEFRVYSSANNCTFEYVSQPFLMDLEGKQGNFKNLREFVFK
NIDGYFKIYSKHTPINLVRDLPQGFSALEPLVDLPIGINITRFQTLLALHRSYLTPGDSSSGWTA
GAAAYYVGYLQPRTFLLKYNENGTITDAVDCALDPLSETKCTLKSFTVEKGIYQTSNFRVQPTES
IVRFPNITNLCPFGEVFNATRFASVYAWNRKRISNCVADYSVLYNSASFSTFKCYGVSPTKLNDL
CFTNVYADSFVIRGDEVRQIAPGQTGKIADYNYKLPDDFTGCVIAWNSNNLDSKVGGNYNYLYRL
FRKSNLKPFERDISTEIYQAGSTPCNGVEGFNCYFPLQSYGFQPTNGVGYQPYRVVVLSFELLHA
PATVCGPKKSTNLVKNKCVNFNFNGLTGTGVLTESNKKFLPFQQFGRDIADTTDAVRDPQTLEIL
DITPCSFGGVSVITPGTNTSNQVAVLYQNVNCTEVPVAIHADQLTPTWRVYSTGSNVFQTRAGCL
IGAEHVNNSYECDIPIGAGICASYQTQTNSPSRAGSVASQSIIAYTMSLGAENSVAYSNNSIAIP
TNFTISVTTEILPVSMTKTSVDCTMYICGDSTECSNLLLQYGSFCTQLNRALTGIAVEQDKNTQE
VFAQVKQIYKTPPIKDFGGFNFSQILPDPSKPSKRSFIEDLLFNKVTLADAGFIKQYGDCLGDIA
ARDLICAQKFNGLTVLPPLLTDEMIAQYTSALLAGTITCGWTFGAGACLQIPFAMQMAYRFNGIG
VTQNVLYENQKLIANQFNSAIGKIQDSLSSTASALGKLQDVVNQNAQALNTLVKQLSSNFGAISS
VLNDILSRLDKVEAEVQIDRLITGRLQSLQTYVTQQLIRAAEIRASANLAATKMSECVLGQSKRV
DFCGKGYHLMSFPQSAPHGVVFLHVTYVPAQEKNFTTAPAICHDGKAHFPREGVFVSNGTHWFVT
QRNFYEPQIITTDNTFVSGNCDVVIGIVNNTVYDPLQPELDSFKEELDKYFKNHTSPDVDLGDIS
GINASVVNIQKEIDRLNEVAKNLNESLIDLQELGKYEQGSGYIPEAPRDGQAYVRKDGEWVLLST
FLGRSLEVLFQGPGSLPETGGGSDYKDDDDKGGGGSGGGGSGGGGSGGGGSGGGGSHHHHHH
SEQ ID NO 34: SEQ ID NO 2 + T572I +
N532P
MFVFLVLLPLVSSQCVNLTTRTQLPPAYTNSFTRGVYYPDKVFRSSVLHSTQDLFLPFFSNVTWF
HAIHVSGTNGTKRFDNPVLPFNDGVYFASTEKSNIIRGWIFGTTLDSKTQSLLIVNNATNVVIKV
CEFQFCNDPFLGVYYHKNNKSWMESEFRVYSSANNCTFEYVSQPFLMDLEGKQGNFKNLREFVFK
NIDGYFKIYSKHTPINLVRDLPQGFSALEPLVDLPIGINITRFQTLLALHRSYLTPGDSSSGWTA
GAAAYYVGYLQPRTFLLKYNENGTITDAVDCALDPLSETKCTLKSFTVEKGIYQTSNFRVQPTES
IVRFPNITNLCPFGEVFNATRFASVYAWNRKRISNCVADYSVLYNSASFSTFKCYGVSPTKLNDL
CFTNVYADSFVIRGDEVRQIAPGQTGKIADYNYKLPDDFTGCVIAWNSNNLDSKVGGNYNYLYRL
FRKSNLKPFERDISTEIYQAGSTPCNGVEGFNCYFPLQSYGFQPTNGVGYQPYRVVVLSFELLHA
PATVCGPKKSTPLVKNKCVNFNFNGLTGTGVLTESNKKFLPFQQFGRDIADITDAVRDPQTLEIL
DITPCSFGGVSVITPGTNTSNQVAVLYQDVNCTEVPVAIHADQLTPTWRVYSTGSNVFQTRAGCL
IGAEHVNNSYECDIPIGAGICASYQTQTNSPSRAGSVASQSIIAYTMSLGAENSVAYSNNSIAIP
TNFTISVTTEILPVSMTKTSVDCTMYICGDSTECSNLLLQYGSFCTQLNRALTGIAVEQDKNTQE
VFAQVKQIYKTPPIKDFGGFNFSQILPDPSKPSKRSFIEDLLFNKVTLADAGFIKQYGDCLGDIA
ARDLICAQKFNGLTVLPPLLTDEMIAQYTSALLAGTITSGWTFGAGAALQIPFAMQMAYRFNGIG
VTQNVLYENQKLIANQFNSAIGKIQDSLSSTASALGKLQDVVNQNAQALNTLVKQLSSNFGAISS
VLNDILSRLDKVEAEVQIDRLITGRLQSLQTYVTQQLIRAAEIRASANLAATKMSECVLGQSKRV
DFCGKGYHLMSFPQSAPHGVVFLHVTYVPAQEKNFTTAPAICHDGKAHFPREGVFVSNGTHWFVT
QRNFYEPQIITTDNTFVSGNCDVVIGIVNNTVYDPLQPELDSFKEELDKYFKNHTSPDVDLGDIS
GINASVVNIQKEIDRLNEVAKNLNESLIDLQELGKYEQGSGYIPEAPRDGQAYVRKDGEWVLLST
FLGRSLEVLFQGPGSLPETGGGSDYKDDDDKGGGGSGGGGSGGGGGGGGSGGGGSHHHHHH
SEQ ID NO 35: SEQ ID NO 2 + T572I +
G880C + F888C
MFVFLVLLPLVSSQCVNLTTRTQLPPAYTNSFTRGVYYPDKVFRSSVLHSTQDLFLPFFSNVTWF
HAIHVSGTNGTKRFDNPVLPFNDGVYFASTEKSNIIRGWIFGTTLDSKTQSLLIVNNATNVVIKV
CEFQFCNDPFLGVYYHKNNKSWMESEFRVYSSANNCTFEYVSQPFLMDLEGKQGNFKNLREFVFK
NIDGYFKIYSKHTPINLVRDLPQGFSALEPLVDLPIGINITRFQTLLALHRSYLTPGDSSSGWTA
GAAAYYVGYLQPRTFLLKYNENGTITDAVDCALDPLSETKCTLKSFTVEKGIYQTSNFRVQPTES
IVRFPNITNLCPFGEVFNATRFASVYAWNRKRISNCVADYSVLYNSASFSTFKCYGVSPTKLNDL
CFTNVYADSFVIRGDEVRQIAPGQTGKIADYNYKLPDDFTGCVIAWNSNNLDSKVGGNYNYLYRL
FRKSNLKPFERDISTEIYQAGSTPCNGVEGFNCYFPLQSYGFQPTNGVGYQPYRVVVLSFELLHA
PATVCGPKKSTNLVKNKCVNFNFNGLTGTGVLTESNKKFLPFQQFGRDIADITDAVRDPQTLEIL
DITPCSFGGVSVITPGTNTSNQVAVLYQDVNCTEVPVAIHADQLTPTWRVYSTGSNVFQTRAGCL
IGAEHVNNSYECDIPIGAGICASYQTQTNSPSRAGSVASQSIIAYTMSLGAENSVAYSNNSIAIP
TNFTISVTTEILPVSMTKTSVDCTMYICGDSTECSNLLLQYGSFCTQLNRALTGIAVEQDKNTQE
VFAQVKQIYKTPPIKDFGGFNFSQILPDPSKPSKRSFIEDLLFNKVTLADAGFIKQYGDCLGDIA
ARDLICAQKFNGLTVLPPLLTDEMIAQYTSALLACTITSGWTCGAGAALQIPFAMQMAYRFNGIG
VTQNVLYENQKLIANQFNSAIGKIQDSLSSTASALGKLQDVVNQNAQALNTLVKQLSSNFGAISS
VLNDILSRLDKVEAEVQIDRLITGRLQSLQTYVTQQLIRAAEIRASANLAATKMSECVLGQSKRV
DFCGKGYHLMSFPQSAPHGVVFLHVTYVPAQEKNFTTAPAICHDGKAHFPREGVFVSNGTHWFVT
QRNFYEPQIITTDNTFVSGNCDVVIGIVNNTVYDPLQPELDSFKEELDKYFKNHTSPDVDLGDIS
GINASVVNIQKEIDRLNEVAKNLNESLIDLQELGKYEQGSGYIPEAPRDGQAYVRKDGEWVLLST
FLGRSLEVLFQGPGSLPETGGGSDYKDDDDKGGGGSGGGGSGGGGSGGGGSGGGGSHHHHHH
SEQ ID NO 36: SEQ ID NO 2 + T572I +
S884C + A893C
MFVFLVLLPLVSSQCVNLTTRTQLPPAYTNSFTRGVYYPDKVFRSSVLHSTQDLFLPFFSNVTWF
HAIHVSGTNGTKRFDNPVLPFNDGVYFASTEKSNIIRGWIFGTTLDSKTQSLLIVNNATNVVIKV
CEFQFCNDPFLGVYYHKNNKSWMESEFRVYSSANNCTFEYVSQPFLMDLEGKQGNFKNLREFVFK
NIDGYFKIYSKHTPINLVRDLPQGFSALEPLVDLPIGINITRFQTLLALHRSYLTPGDSSSGWTA
GAAAYYVGYLQPRTFLLKYNENGTITDAVDCALDPLSETKCTLKSFTVEKGIYQTSNFRVQPTES
IVRFPNITNLCPFGEVFNATRFASVYAWNRKRISNCVADYSVLYNSASFSTFKCYGVSPTKLNDL
CFTNVYADSFVIRGDEVRQIAPGQTGKIADYNYKLPDDFTGCVIAWNSNNLDSKVGGNYNYLYRL
FRKSNLKPFERDISTEIYQAGSTPCNGVEGFNCYFPLQSYGFQPTNGVGYQPYRVVVLSFELLHA
PATVCGPKKSTNLVKNKCVNFNFNGLTGTGVLTESNKKFLPFQQFGRDIADITDAVRDPQTLEIL
DITPCSFGGVSVITPGTNTSNQVAVLYQDVNCTEVPVAIHADQLTPTWRVYSTGSNVFQTRAGCL
IGAEHVNNSYECDIPIGAGICASYQTQTNSPSRAGSVASQSIIAYTMSLGAENSVAYSNNSIAIP
TNFTISVTTEILPVSMTKTSVDCTMYICGDSTECSNLLLQYGSFCTQLNRALTGIAVEQDKNTQE
VFAQVKQIYKTPPIKDFGGFNFSQILPDPSKPSKRSFIEDLLFNKVTLADAGFIKQYGDCLGDIA
ARDLICAQKFNGLTVLPPLLTDEMIAQYTSALLAGTITCGWTFGAGACLQIPFAMQMAYRFNGIG
VTQNVLYENQKLIANQFNSAIGKIQDSLSSTASALGKLQDVVNQNAQALNTLVKQLSSNFGAISS
VLNDILSRLDKVEAEVQIDRLITGRLQSLQTYVTQQLIRAAEIRASANLAATKMSECVLGQSKRV
DFCGKGYHLMSFPQSAPHGVVFLHVTYVPAQEKNFTTAPAICHDGKAHFPREGVFVSNGTHWFVT
QRNFYEPQIITTDNTFVSGNCDVVIGIVNNTVYDPLQPELDSFKEELDKYFKNHTSPDVDLGDIS
GINASVVNIQKEIDRLNEVAKNLNESLIDLQELGKYEQGSGYIPEAPRDGQAYVRKDGEWVLLST
FLGRSLEVLFQGPGSLPETGGGSDYKDDDDKGGGGSGGGGSGGGGSGGGGSGGGGSHHHHHH
SEQ ID NO 37: SEQ ID NO 2 + N532P + G880C + F888C
MFVFLVLLPLVSSQCVNLTTRTQLPPAYTNSFTRGVYYPDKVFRSSVLHSTQDLFLPFFSNVTWF
HAIHVSGTNGTKRFDNPVLPFNDGVYFASTEKSNIIRGWIFGTTLDSKTQSLLIVNNATNVVIKV
CEFQFCNDPFLGVYYHKNNKSWMESEFRVYSSANNCTFEYVSQPFLMDLEGKQGNFKNLREFVFK
NIDGYFKIYSKHTPINLVRDLPQGFSALEPLVDLPIGINITRFQTLLALHRSYLTPGDSSSGWTA
GAAAYYVGYLQPRTFLLKYNENGTITDAVDCALDPLSETKCTLKSFTVEKGIYQTSNFRVQPTES
IVRFPNITNLCPFGEVFNATRFASVYAWNRKRISNCVADYSVLYNSASFSTFKCYGVSPTKLNDL
CFTNVYADSFVIRGDEVRQIAPGQTGKIADYNYKLPDDFTGCVIAWNSNNLDSKVGGNYNYLYRL
FRKSNLKPFERDISTEIYQAGSTPCNGVEGFNCYFPLQSYGFQPTNGVGYQPYRVVVLSFELLHA
PATVCGPKKSTPLVKNKCVNFNFNGLTGTGVLTESNKKFLPFQQFGRDIADTTDAVRDPQTLEIL
DITPCSFGGVSVITPGTNTSNQVAVLYQDVNCTEVPVAIHADQLTPTWRVYSTGSNVFQTRAGCL
IGAEHVNNSYECDIPIGAGICASYQTQTNSPSRAGSVASQSIIAYTMSLGAENSVAYSNNSIAIP
TNFTISVTTEILPVSMTKTSVDCTMYICGDSTECSNLLLQYGSFCTQLNRALTGIAVEQDKNTQE
VFAQVKQIYKTPPIKDFGGFNFSQILPDPSKPSKRSFIEDLLFNKVTLADAGFIKQYGDCLGDIA
ARDLICAQKFNGLTVLPPLLTDEMIAQYTSALLACTITSGWTCGAGAALQIPFAMQMAYRFNGIG
VTQNVLYENQKLIANQFNSAIGKIQDSLSSTASALGKLQDVVNQNAQALNTLVKQLSSNFGAISS
VLNDILSRLDKVEAEVQIDRLITGRLQSLQTYVTQQLIRAAEIRASANLAATKMSECVLGQSKRV
DFCGKGYHLMSFPQSAPHGVVFLHVTYVPAQEKNFTTAPAICHDGKAHFPREGVFVSNGTHWFVT
QRNFYEPQIITTDNTFVSGNCDVVIGIVNNTVYDPLQPELDSFKEELDKYFKNHTSPDVDLGDIS
GINASVVNIQKEIDRLNEVAKNLNESLIDLQELGKYEQGSGYIPEAPRDGQAYVRKDGEWVLLST
FLGRSLEVLFQGPGSLPETGGGSDYKDDDDKGGGGGGGGSGGGGSGGGGSGGGGSHHHHHH
SEQ ID NO 38: SEQ ID NO 2 + N532P + S884C + A893C
MFVFLVLLPLVSSQCVNLTTRTQLPPAYTNSFTRGVYYPDKVFRSSVLHSTQDLFLPFFSNVTWF
HAIHVSGTNGTKRFDNPVLPFNDGVYFASTEKSNIIRGWIFGTTLDSKTQSLLIVNNATNVVIKV
CEFQFCNDPFLGVYYHKNNKSWMESEFRVYSSANNCTFEYVSQPFLMDLEGKQGNFKNLREFVFK
NIDGYFKIYSKHTPINLVRDLPQGFSALEPLVDLPIGINITRFQTLLALHRSYLTPGDSSSGWTA
GAAAYYVGYLQPRTFLLKYNENGTITDAVDCALDPLSETKCTLKSFTVEKGIYQTSNFRVQPTES
IVRFPNITNLCPFGEVFNATRFASVYAWNRKRISNCVADYSVLYNSASFSTFKCYGVSPTKLNDL
CFTNVYADSFVIRGDEVRQIAPGQTGKIADYNYKLPDDFTGCVIAWNSNNLDSKVGGNYNYLYRL
FRKSNLKPFERDISTEIYQAGSTPCNGVEGFNCYFPLQSYGFQPTNGVGYQPYRVVVLSFELLHA
PATVCGPKKSTPLVKNKCVNFNFNGLTGTGVLTESNKKFLPFQQFGRDIADTTDAVRDPQTLEIL
DITPCSFGGVSVITPGTNTSNQVAVLYQDVNCTEVPVAIHADQLTPTWRVYSTGSNVFQTRAGCL
IGAEHVNNSYECDIPIGAGICASYQTQTNSPSRAGSVASQSIIAYTMSLGAENSVAYSNNSIAIP
TNFTISVTTEILPVSMTKTSVDCTMYICGDSTECSNLLLQYGSFCTQLNRALTGIAVEQDKNTQE
VFAQVKQIYKTPPIKDFGGFNFSQILPDPSKPSKRSFIEDLLFNKVTLADAGFIKQYGDCLGDIA
ARDLICAQKFNGLTVLPPLLTDEMIAQYTSALLAGTITCGWTFGAGACLQIPFAMQMAYRFNGIG
VTQNVLYENQKLIANQFNSAIGKIQDSLSSTASALGKLQDVVNQNAQALNTLVKQLSSNFGAISS
VLNDILSRLDKVEAEVQIDRLITGRLQSLQTYVTQQLIRAAEIRASANLAATKMSECVLGQSKRV
DFCGKGYHLMSFPQSAPHGVVFLHVTYVPAQEKNFTTAPAICHDGKAHFPREGVFVSNGTHWFVT
QRNFYEPQIITTDNTFVSGNCDVVIGIVNNTVYDPLQPELDSFKEELDKYFKNHTSPDVDLGDIS
GINASVVNIQKEIDRLNEVAKNLNESLIDLQELGKYEQGSGYIPEAPRDGQAYVRKDGEWVLLST
FLGRSLEVLFQGPGSLPETGGGSDYKDDDDKGGGGSGGGGSGGGGSGGGGSGGGGSHHHHHH
SEQ ID NO 39: SEQ ID NO 2 + A942P + A892P + D614N
MFVFLVLLPLVSSQCVNLTTRTQLPPAYTNSFTRGVYYPDKVFRSSVLHSTQDLFLPFFSNVTWF
HAIHVSGTNGTKRFDNPVLPFNDGVYFASTEKSNIIRGWIFGTTLDSKTQSLLIVNNATNVVIKV
CEFQFCNDPFLGVYYHKNNKSWMESEFRVYSSANNCTFEYVSQPFLMDLEGKQGNFKNLREFVFK
NIDGYFKIYSKHTPINLVRDLPQGFSALEPLVDLPIGINITRFQTLLALHRSYLTPGDSSSGWTA
GAAAYYVGYLQPRTFLLKYNENGTITDAVDCALDPLSETKCTLKSFTVEKGIYQTSNFRVQPTES
IVRFPNITNLCPFGEVFNATRFASVYAWNRKRISNCVADYSVLYNSASFSTFKCYGVSPTKLNDL
CFTNVYADSFVIRGDEVRQIAPGQTGKIADYNYKLPDDFTGCVIAWNSNNLDSKVGGNYNYLYRL
FRKSNLKPFERDISTEIYQAGSTPCNGVEGFNCYFPLQSYGFQPTNGVGYQPYRVVVLSFELLHA
PATVCGPKKSTNLVKNKCVNFNFNGLTGTGVLTESNKKFLPFQQFGRDIADTTDAVRDPQTLEIL
DITPCSFGGVSVITPGTNTSNQVAVLYQNVNCTEVPVAIHADQLTPTWRVYSTGSNVFQTRAGCL
IGAEHVNNSYECDIPIGAGICASYQTQTNSPSRAGSVASQSIIAYTMSLGAENSVAYSNNSIAIP
TNFTISVTTEILPVSMTKTSVDCTMYICGDSTECSNLLLQYGSFCTQLNRALTGIAVEQDKNTQE
VFAQVKQIYKTPPIKDFGGFNFSQILPDPSKPSKRSFIEDLLFNKVTLADAGFIKQYGDCLGDIA
ARDLICAQKFNGLTVLPPLLTDEMIAQYTSALLAGTITSGWTFGAGPALQIPFAMQMAYRFNGIG
VTQNVLYENQKLIANQFNSAIGKIQDSLSSTPSALGKLQDVVNQNAQALNTLVKQLSSNFGAISS
VLNDILSRLDKVEAEVQIDRLITGRLQSLQTYVTQQLIRAAEIRASANLAATKMSECVLGQSKRV
DFCGKGYHLMSFPQSAPHGVVFLHVTYVPAQEKNFTTAPAICHDGKAHFPREGVFVSNGTHWFVT
QRNFYEPQIITTDNTFVSGNCDVVIGIVNNTVYDPLQPELDSFKEELDKYFKNHTSPDVDLGDIS
GINASVVNIQKEIDRLNEVAKNLNESLIDLQELGKYEQGSGYIPEAPRDGQAYVRKDGEWVLLST
FLGRSLEVLFQGPGSLPETGGGSDYKDDDDKGGGGSGGGGSGGGGSGGGGSGGGGSHHHHHH
SEQ ID NO 40: SEQ ID NO 2 + A942P + A892P + T572I
MFVFLVLLPLVSSQCVNLTTRTQLPPAYTNSFTRGVYYPDKVFRSSVLHSTQDLFLPFFSNVTWF
HAIHVSGTNGTKRFDNPVLPFNDGVYFASTEKSNIIRGWIFGTTLDSKTQSLLIVNNATNVVIKV
CEFQFCNDPFLGVYYHKNNKSWMESEFRVYSSANNCTFEYVSQPFLMDLEGKQGNFKNLREFVFK
NIDGYFKIYSKHTPINLVRDLPQGFSALEPLVDLPIGINITRFQTLLALHRSYLTPGDSSSGWTA
GAAAYYVGYLQPRTFLLKYNENGTITDAVDCALDPLSETKCTLKSFTVEKGIYQTSNFRVQPTES
IVRFPNITNLCPFGEVFNATRFASVYAWNRKRISNCVADYSVLYNSASFSTFKCYGVSPTKLNDL
CFTNVYADSFVIRGDEVRQIAPGQTGKIADYNYKLPDDFTGCVIAWNSNNLDSKVGGNYNYLYRL
FRKSNLKPFERDISTEIYQAGSTPCNGVEGFNCYFPLQSYGFQPTNGVGYQPYRVVVLSFELLHA
PATVCGPKKSTNLVKNKCVNFNFNGLTGTGVLTESNKKFLPFQQFGRDIADITDAVRDPQTLEIL
DITPCSFGGVSVITPGTNTSNQVAVLYQDVNCTEVPVAIHADQLTPTWRVYSTGSNVFQTRAGCL
IGAEHVNNSYECDIPIGAGICASYQTQTNSPSRAGSVASQSIIAYTMSLGAENSVAYSNNSIAIP
TNFTISVTTEILPVSMTKTSVDCTMYICGDSTECSNLLLQYGSFCTQLNRALTGIAVEQDKNTQE
VFAQVKQIYKTPPIKDFGGFNFSQILPDPSKPSKRSFIEDLLFNKVTLADAGFIKQYGDCLGDIA
ARDLICAQKFNGLTVLPPLLTDEMIAQYTSALLAGTITSGWTFGAGPALQIPFAMQMAYRFNGIG
VTQNVLYENQKLIANQFNSAIGKIQDSLSSTPSALGKLQDVVNQNAQALNTLVKQLSSNFGAISS
VLNDILSRLDKVEAEVQIDRLITGRLQSLQTYVTQQLIRAAEIRASANLAATKMSECVLGQSKRV
DFCGKGYHLMSFPQSAPHGVVFLHVTYVPAQEKNFTTAPAICHDGKAHFPREGVFVSNGTHWFVT
QRNFYEPQIITTDNTFVSGNCDVVIGIVNNTVYDPLQPELDSFKEELDKYFKNHTSPDVDLGDIS
GINASVVNIQKEIDRLNEVAKNLNESLIDLQELGKYEQGSGYIPEAPRDGQAYVRKDGEWVLLST
FLGRSLEVLFQGPGSLPETGGGSDYKDDDDKGGGGSGGGGSGGGGSGGGGSGGGGSHHHHHH
SEQ ID NO 41: SEQ ID NO 2 + A942P + A892P + N532P
MFVFLVLLPLVSSQCVNLTTRTQLPPAYTNSFTRGVYYPDKVFRSSVLHSTQDLFLPFFSNVTWF
HAIHVSGTNGTKRFDNPVLPFNDGVYFASTEKSNIIRGWIFGTTLDSKTQSLLIVNNATNVVIKV
CEFQFCNDPFLGVYYHKNNKSWMESEFRVYSSANNCTFEYVSQPFLMDLEGKQGNFKNLREFVFK
NIDGYFKIYSKHTPINLVRDLPQGFSALEPLVDLPIGINITRFQTLLALHRSYLTPGDSSSGWTA
GAAAYYVGYLQPRTFLLKYNENGTITDAVDCALDPLSETKCTLKSFTVEKGIYQTSNFRVQPTES
IVRFPNITNLCPFGEVFNATRFASVYAWNRKRISNCVADYSVLYNSASFSTFKCYGVSPTKLNDL
CFTNVYADSFVIRGDEVRQIAPGQTGKIADYNYKLPDDFTGCVIAWNSNNLDSKVGGNYNYLYRL
FRKSNLKPFERDISTEIYQAGSTPCNGVEGFNCYFPLQSYGFQPTNGVGYQPYRVVVLSFELLHA
PATVCGPKKSTPLVKNKCVNFNFNGLTGTGVLTESNKKFLPFQQFGRDIADTTDAVRDPQTLEIL
DITPCSFGGVSVITPGTNTSNQVAVLYQDVNCTEVPVAIHADQLTPTWRVYSTGSNVFQTRAGCL
IGAEHVNNSYECDIPIGAGICASYQTQTNSPSRAGSVASQSIIAYTMSLGAENSVAYSNNSIAIP
TNFTISVTTEILPVSMTKTSVDCTMYICGDSTECSNLLLQYGSFCTQLNRALTGIAVEQDKNTQE
VFAQVKQIYKTPPIKDFGGFNFSQILPDPSKPSKRSFIEDLLFNKVTLADAGFIKQYGDCLGDIA
ARDLICAQKFNGLTVLPPLLTDEMIAQYTSALLAGTITSGWTFGAGPALQIPFAMQMAYRFNGIG
VTQNVLYENQKLIANQFNSAIGKIQDSLSSTPSALGKLQDVVNQNAQALNTLVKQLSSNFGAISS
VLNDILSRLDKVEAEVQIDRLITGRLQSLQTYVTQQLIRAAEIRASANLAATKMSECVLGQSKRV
DFCGKGYHLMSFPQSAPHGVVFLHVTYVPAQEKNFTTAPAICHDGKAHFPREGVFVSNGTHWFVT
QRNFYEPQIITTDNTFVSGNCDVVIGIVNNTVYDPLQPELDSFKEELDKYFKNHTSPDVDLGDIS
GINASVVNIQKEIDRLNEVAKNLNESLIDLQELGKYEQGSGYIPEAPRDGQAYVRKDGEWVLLST
FLGRSLEVLFQGPGSLPETGGGSDYKDDDDKGGGGSGGGGSGGGGSGGGGSGGGGSHHHHHH
SEQ ID NO 42: SEQ ID NO 2 + A942P + A892P + G880C + F888C
MFVFLVLLPLVSSQCVNLTTRTQLPPAYTNSFTRGVYYPDKVFRSSVLHSTQDLFLPFFSNVTWF
HAIHVSGTNGTKRFDNPVLPFNDGVYFASTEKSNIIRGWIFGTTLDSKTQSLLIVNNATNVVIKV
CEFQFCNDPFLGVYYHKNNKSWMESEFRVYSSANNCTFEYVSQPFLMDLEGKQGNFKNLREFVFK
NIDGYFKIYSKHTPINLVRDLPQGFSALEPLVDLPIGINITRFQTLLALHRSYLTPGDSSSGWTA
GAAAYYVGYLQPRTFLLKYNENGTITDAVDCALDPLSETKCTLKSFTVEKGIYQTSNFRVQPTES
IVRFPNITNLCPFGEVFNATRFASVYAWNRKRISNCVADYSVLYNSASFSTFKCYGVSPTKLNDL
CFTNVYADSFVIRGDEVRQIAPGQTGKIADYNYKLPDDFTGCVIAWNSNNLDSKVGGNYNYLYRL
FRKSNLKPFERDISTEIYQAGSTPCNGVEGFNCYFPLQSYGFQPTNGVGYQPYRVVVLSFELLHA
PATVCGPKKSTNLVKNKCVNFNFNGLTGTGVLTESNKKFLPFQQFGRDIADTTDAVRDPQTLEIL
DITPCSFGGVSVITPGTNTSNQVAVLYQDVNCTEVPVAIHADQLTPTWRVYSTGSNVFQTRAGCL
IGAEHVNNSYECDIPIGAGICASYQTQTNSPSRAGSVASQSIIAYTMSLGAENSVAYSNNSIAIP
TNFTISVTTEILPVSMTKTSVDCTMYICGDSTECSNLLLQYGSFCTQLNRALTGIAVEQDKNTQE
VFAQVKQIYKTPPIKDFGGFNFSQILPDPSKPSKRSFIEDLLFNKVTLADAGFIKQYGDCLGDIA
ARDLICAQKFNGLTVLPPLLTDEMIAQYTSALLACTITSGWTCGAGPALQIPFAMQMAYRFNGIG
VTQNVLYENQKLIANQFNSAIGKIQDSLSSTPSALGKLQDVVNQNAQALNTLVKQLSSNFGAISS
VLNDILSRLDKVEAEVQIDRLITGRLQSLQTYVTQQLIRAAEIRASANLAATKMSECVLGQSKRV
DFCGKGYHLMSFPQSAPHGVVFLHVTYVPAQEKNFTTAPAICHDGKAHFPREGVFVSNGTHWFVT
QRNFYEPQIITTDNTFVSGNCDVVIGIVNNTVYDPLQPELDSFKEELDKYFKNHTSPDVDLGDIS
GINASVVNIQKEIDRLNEVAKNLNESLIDLQELGKYEQGSGYIPEAPRDGQAYVRKDGEWVLLST
FLGRSLEVLFQGPGSLPETGGGSDYKDDDDKGGGGSGGGGSGGGGSGGGGSGGGGSHHHHHH
SEQ ID NO 43: SEQ ID NO 2 + A942P + A892P + S884C + A893C
MFVFLVLLPLVSSQCVNLTTRTQLPPAYTNSFTRGVYYPDKVFRSSVLHSTQDLFLPFFSNVTWF
HAIHVSGTNGTKRFDNPVLPFNDGVYFASTEKSNIIRGWIFGTTLDSKTQSLLIVNNATNVVIKV
CEFQFCNDPFLGVYYHKNNKSWMESEFRVYSSANNCTFEYVSQPFLMDLEGKQGNFKNLREFVFK
NIDGYFKIYSKHTPINLVRDLPQGFSALEPLVDLPIGINITRFQTLLALHRSYLTPGDSSSGWTA
GAAAYYVGYLQPRTFLLKYNENGTITDAVDCALDPLSETKCTLKSFTVEKGIYQTSNFRVQPTES
IVRFPNITNLCPFGEVFNATRFASVYAWNRKRISNCVADYSVLYNSASFSTFKCYGVSPTKLNDL
CFTNVYADSFVIRGDEVRQIAPGQTGKIADYNYKLPDDFTGCVIAWNSNNLDSKVGGNYNYLYRL
FRKSNLKPFERDISTEIYQAGSTPCNGVEGFNCYFPLQSYGFQPTNGVGYQPYRVVVLSFELLHA
PATVCGPKKSTNLVKNKCVNFNFNGLTGTGVLTESNKKFLPFQQFGRDIADTTDAVRDPQTLEIL
DITPCSFGGVSVITPGTNTSNQVAVLYQDVNCTEVPVAIHADQLTPTWRVYSTGSNVFQTRAGCL
IGAEHVNNSYECDIPIGAGICASYQTQTNSPSRAGSVASQSIIAYTMSLGAENSVAYSNNSIAIP
TNFTISVTTEILPVSMTKTSVDCTMYICGDSTECSNLLLQYGSFCTQLNRALTGIAVEQDKNTQE
VFAQVKQIYKTPPIKDFGGFNFSQILPDPSKPSKRSFIEDLLFNKVTLADAGFIKQYGDCLGDIA
ARDLICAQKFNGLTVLPPLLTDEMIAQYTSALLAGTITCGWTFGAGPCLQIPFAMQMAYRFNGIG
VTQNVLYENQKLIANQFNSAIGKIQDSLSSTPSALGKLQDVVNQNAQALNTLVKQLSSNFGAISS
VLNDILSRLDKVEAEVQIDRLITGRLQSLQTYVTQQLIRAAEIRASANLAATKMSECVLGQSKRV
DFCGKGYHLMSFPQSAPHGVVFLHVTYVPAQEKNFTTAPAICHDGKAHFPREGVFVSNGTHWFVT
QRNFYEPQIITTDNTFVSGNCDVVIGIVNNTVYDPLQPELDSFKEELDKYFKNHTSPDVDLGDIS
GINASVVNIQKEIDRLNEVAKNLNESLIDLQELGKYEQGSGYIPEAPRDGQAYVRKDGEWVLLST
FLGRSLEVLFQGPGSLPETGGGSDYKDDDDKGGGGSGGGGSGGGGSGGGGSGGGGSHHHHHH
SEQ ID NO 44: SEQ ID NO 2 + A942P + D614N + T572I
MFVFLVLLPLVSSQCVNLTTRTQLPPAYTNSFTRGVYYPDKVFRSSVLHSTQDLFLPFFSNVTWF
HAIHVSGTNGTKRFDNPVLPFNDGVYFASTEKSNIIRGWIFGTTLDSKTQSLLIVNNATNVVIKV
CEFQFCNDPFLGVYYHKNNKSWMESEFRVYSSANNCTFEYVSQPFLMDLEGKQGNFKNLREFVFK
NIDGYFKIYSKHTPINLVRDLPQGFSALEPLVDLPIGINITRFQTLLALHRSYLTPGDSSSGWTA
GAAAYYVGYLQPRTFLLKYNENGTITDAVDCALDPLSETKCTLKSFTVEKGIYQTSNFRVQPTES
IVRFPNITNLCPFGEVFNATRFASVYAWNRKRISNCVADYSVLYNSASFSTFKCYGVSPTKLNDL
CFTNVYADSFVIRGDEVRQIAPGQTGKIADYNYKLPDDFTGCVIAWNSNNLDSKVGGNYNYLYRL
FRKSNLKPFERDISTEIYQAGSTPCNGVEGFNCYFPLQSYGFQPTNGVGYQPYRVVVLSFELLHA
PATVCGPKKSTNLVKNKCVNFNFNGLTGTGVLTESNKKFLPFQQFGRDIADITDAVRDPQTLEIL
DITPCSFGGVSVITPGTNTSNQVAVLYQNVNCTEVPVAIHADQLTPTWRVYSTGSNVFQTRAGCL
IGAEHVNNSYECDIPIGAGICASYQTQTNSPSRAGSVASQSIIAYTMSLGAENSVAYSNNSIAIP
TNFTISVTTEILPVSMTKTSVDCTMYICGDSTECSNLLLQYGSFCTQLNRALTGIAVEQDKNTQE
VFAQVKQIYKTPPIKDFGGFNFSQILPDPSKPSKRSFIEDLLFNKVTLADAGFIKQYGDCLGDIA
ARDLICAQKFNGLTVLPPLLTDEMIAQYTSALLAGTITSGWTFGAGAALQIPFAMQMAYRFNGIG
VTQNVLYENQKLIANQFNSAIGKIQDSLSSTPSALGKLQDVVNQNAQALNTLVKQLSSNFGAISS
VLNDILSRLDKVEAEVQIDRLITGRLQSLQTYVTQQLIRAAEIRASANLAATKMSECVLGQSKRV
DFCGKGYHLMSFPQSAPHGVVFLHVTYVPAQEKNFTTAPAICHDGKAHFPREGVFVSNGTHWFVT
QRNFYEPQIITTDNTFVSGNCDVVIGIVNNTVYDPLQPELDSFKEELDKYFKNHTSPDVDLGDIS
GINASVVNIQKEIDRLNEVAKNLNESLIDLQELGKYEQGSGYIPEAPRDGQAYVRKDGEWVLLST
FLGRSLEVLFQGPGSLPETGGGSDYKDDDDKGGGGSGGGGSGGGGSGGGGSGGGGSHHHHHH
SEQ ID NO 45: SEQ ID NO 2 + A942P + D614N + N532P
MFVFLVLLPLVSSQCVNLTTRTQLPPAYTNSFTRGVYYPDKVFRSSVLHSTQDLFLPFFSNVTWF
HAIHVSGTNGTKRFDNPVLPFNDGVYFASTEKSNIIRGWIFGTTLDSKTQSLLIVNNATNVVIKV
CEFQFCNDPFLGVYYHKNNKSWMESEFRVYSSANNCTFEYVSQPFLMDLEGKQGNFKNLREFVFK
NIDGYFKIYSKHTPINLVRDLPQGFSALEPLVDLPIGINITRFQTLLALHRSYLTPGDSSSGWTA
GAAAYYVGYLQPRTFLLKYNENGTITDAVDCALDPLSETKCTLKSFTVEKGIYQTSNFRVQPTES
IVRFPNITNLCPFGEVFNATRFASVYAWNRKRISNCVADYSVLYNSASFSTFKCYGVSPTKLNDL
CFTNVYADSFVIRGDEVRQIAPGQTGKIADYNYKLPDDFTGCVIAWNSNNLDSKVGGNYNYLYRL
FRKSNLKPFERDISTEIYQAGSTPCNGVEGFNCYFPLQSYGFQPTNGVGYQPYRVVVLSFELLHA
PATVCGPKKSTPLVKNKCVNFNFNGLTGTGVLTESNKKFLPFQQFGRDIADTTDAVRDPQTLEIL
DITPCSFGGVSVITPGTNTSNQVAVLYQNVNCTEVPVAIHADQLTPTWRVYSTGSNVFQTRAGCL
IGAEHVNNSYECDIPIGAGICASYQTQTNSPSRAGSVASQSIIAYTMSLGAENSVAYSNNSIAIP
TNFTISVTTEILPVSMTKTSVDCTMYICGDSTECSNLLLQYGSFCTQLNRALTGIAVEQDKNTQE
VFAQVKQIYKTPPIKDFGGFNFSQILPDPSKPSKRSFIEDLLFNKVTLADAGFIKQYGDCLGDIA
ARDLICAQKFNGLTVLPPLLTDEMIAQYTSALLAGTITSGWTFGAGAALQIPFAMQMAYRFNGIG
VTQNVLYENQKLIANQFNSAIGKIQDSLSSTPSALGKLQDVVNQNAQALNTLVKQLSSNFGAISS
VLNDILSRLDKVEAEVQIDRLITGRLQSLQTYVTQQLIRAAEIRASANLAATKMSECVLGQSKRV
DFCGKGYHLMSFPQSAPHGVVFLHVTYVPAQEKNFTTAPAICHDGKAHFPREGVFVSNGTHWFVT
QRNFYEPQIITTDNTFVSGNCDVVIGIVNNTVYDPLQPELDSFKEELDKYFKNHTSPDVDLGDIS
GINASVVNIQKEIDRLNEVAKNLNESLIDLQELGKYEQGSGYIPEAPRDGQAYVRKDGEWVLLST
FLGRSLEVLFQGPGSLPETGGGSDYKDDDDKGGGGSGGGGSGGGGSGGGGSGGGGSHHHHHH
SEQ ID NO 46: SEQ ID NO 2 + A942P + D614N + G880C + F888C
MFVFLVLLPLVSSQCVNLTTRTQLPPAYTNSFTRGVYYPDKVFRSSVLHSTQDLFLPFFSNVTWF
HAIHVSGTNGTKRFDNPVLPFNDGVYFASTEKSNIIRGWIFGTTLDSKTQSLLIVNNATNVVIKV
CEFQFCNDPFLGVYYHKNNKSWMESEFRVYSSANNCTFEYVSQPFLMDLEGKQGNFKNLREFVFK
NIDGYFKIYSKHTPINLVRDLPQGFSALEPLVDLPIGINITRFQTLLALHRSYLTPGDSSSGWTA
GAAAYYVGYLQPRTFLLKYNENGTITDAVDCALDPLSETKCTLKSFTVEKGIYQTSNFRVQPTES
IVRFPNITNLCPFGEVFNATRFASVYAWNRKRISNCVADYSVLYNSASFSTFKCYGVSPTKLNDL
CFTNVYADSFVIRGDEVRQIAPGQTGKIADYNYKLPDDFTGCVIAWNSNNLDSKVGGNYNYLYRL
FRKSNLKPFERDISTEIYQAGSTPCNGVEGFNCYFPLQSYGFQPTNGVGYQPYRVVVLSFELLHA
PATVCGPKKSTNLVKNKCVNFNFNGLTGTGVLTESNKKFLPFQQFGRDIADTTDAVRDPQTLEIL
DITPCSFGGVSVITPGTNTSNQVAVLYQNVNCTEVPVAIHADQLTPTWRVYSTGSNVFQTRAGCL
IGAEHVNNSYECDIPIGAGICASYQTQTNSPSRAGSVASQSIIAYTMSLGAENSVAYSNNSIAIP
TNFTISVTTEILPVSMTKTSVDCTMYICGDSTECSNLLLQYGSFCTQLNRALTGIAVEQDKNTQE
VFAQVKQIYKTPPIKDFGGFNFSQILPDPSKPSKRSFIEDLLFNKVTLADAGFIKQYGDCLGDIA
ARDLICAQKFNGLTVLPPLLTDEMIAQYTSALLACTITSGWTCGAGAALQIPFAMQMAYRFNGIG
VTQNVLYENQKLIANQFNSAIGKIQDSLSSTPSALGKLQDVVNQNAQALNTLVKQLSSNFGAISS
VLNDILSRLDKVEAEVQIDRLITGRLQSLQTYVTQQLIRAAEIRASANLAATKMSECVLGQSKRV
DFCGKGYHLMSFPQSAPHGVVFLHVTYVPAQEKNFTTAPAICHDGKAHFPREGVFVSNGTHWFVT
QRNFYEPQIITTDNTFVSGNCDVVIGIVNNTVYDPLQPELDSFKEELDKYFKNHTSPDVDLGDIS
GINASVVNIQKEIDRLNEVAKNLNESLIDLQELGKYEQGSGYIPEAPRDGQAYVRKDGEWVLLST
FLGRSLEVLFQGPGSLPETGGGSDYKDDDDKGGGGSGGGGSGGGGSGGGGSGGGGSHHHHHH
SEQ ID NO 47: SEQ ID NO 2 + A942P + D614N + S884C + A893C
MFVFLVLLPLVSSQCVNLTTRTQLPPAYTNSFTRGVYYPDKVFRSSVLHSTQDLFLPFFSNVTWF
HAIHVSGTNGTKRFDNPVLPFNDGVYFASTEKSNIIRGWIFGTTLDSKTQSLLIVNNATNVVIKV
CEFQFCNDPFLGVYYHKNNKSWMESEFRVYSSANNCTFEYVSQPFLMDLEGKQGNFKNLREFVFK
NIDGYFKIYSKHTPINLVRDLPQGFSALEPLVDLPIGINITRFQTLLALHRSYLTPGDSSSGWTA
GAAAYYVGYLQPRTFLLKYNENGTITDAVDCALDPLSETKCTLKSFTVEKGIYQTSNFRVQPTES
IVRFPNITNLCPFGEVFNATRFASVYAWNRKRISNCVADYSVLYNSASFSTFKCYGVSPTKLNDL
CFTNVYADSFVIRGDEVRQIAPGQTGKIADYNYKLPDDFTGCVIAWNSNNLDSKVGGNYNYLYRL
FRKSNLKPFERDISTEIYQAGSTPCNGVEGFNCYFPLQSYGFQPTNGVGYQPYRVVVLSFELLHA
PATVCGPKKSTNLVKNKCVNFNFNGLTGTGVLTESNKKFLPFQQFGRDIADTTDAVRDPQTLEIL
DITPCSFGGVSVITPGTNTSNQVAVLYQNVNCTEVPVAIHADQLTPTWRVYSTGSNVFQTRAGCL
IGAEHVNNSYECDIPIGAGICASYQTQTNSPSRAGSVASQSIIAYTMSLGAENSVAYSNNSIAIP
TNFTISVTTEILPVSMTKTSVDCTMYICGDSTECSNLLLQYGSFCTQLNRALTGIAVEQDKNTQE
VFAQVKQIYKTPPIKDFGGFNFSQILPDPSKPSKRSFIEDLLFNKVTLADAGFIKQYGDCLGDIA
ARDLICAQKFNGLTVLPPLLTDEMIAQYTSALLAGTITCGWTFGAGACLQIPFAMQMAYRFNGIG
VTQNVLYENQKLIANQFNSAIGKIQDSLSSTPSALGKLQDVVNQNAQALNTLVKQLSSNFGAISS
VLNDILSRLDKVEAEVQIDRLITGRLQSLQTYVTQQLIRAAEIRASANLAATKMSECVLGQSKRV
DFCGKGYHLMSFPQSAPHGVVFLHVTYVPAQEKNFTTAPAICHDGKAHFPREGVFVSNGTHWFVT
QRNFYEPQIITTDNTFVSGNCDVVIGIVNNTVYDPLQPELDSFKEELDKYFKNHTSPDVDLGDIS
GINASVVNIQKEIDRLNEVAKNLNESLIDLQELGKYEQGSGYIPEAPRDGQAYVRKDGEWVLLST
FLGRSLEVLFQGPGSLPETGGGSDYKDDDDKGGGGSGGGGSGGGGSGGGGSGGGGSHHHHHH
SEQ ID NO 48: SEQ ID NO 2 + A942P + T572I +
N532P
MFVFLVLLPLVSSQCVNLTTRTQLPPAYTNSFTRGVYYPDKVFRSSVLHSTQDLFLPFFSNVTWF
HAIHVSGTNGTKRFDNPVLPFNDGVYFASTEKSNIIRGWIFGTTLDSKTQSLLIVNNATNVVIKV
CEFQFCNDPFLGVYYHKNNKSWMESEFRVYSSANNCTFEYVSQPFLMDLEGKQGNFKNLREFVFK
NIDGYFKIYSKHTPINLVRDLPQGFSALEPLVDLPIGINITRFQTLLALHRSYLTPGDSSSGWTA
GAAAYYVGYLQPRTFLLKYNENGTITDAVDCALDPLSETKCTLKSFTVEKGIYQTSNFRVQPTES
IVRFPNITNLCPFGEVFNATRFASVYAWNRKRISNCVADYSVLYNSASFSTFKCYGVSPTKLNDL
CFTNVYADSFVIRGDEVRQIAPGQTGKIADYNYKLPDDFTGCVIAWNSNNLDSKVGGNYNYLYRL
FRKSNLKPFERDISTEIYQAGSTPCNGVEGFNCYFPLQSYGFQPTNGVGYQPYRVVVLSFELLHA
PATVCGPKKSTPLVKNKCVNFNFNGLTGTGVLTESNKKFLPFQQFGRDIADITDAVRDPQTLEIL
DITPCSFGGVSVITPGTNTSNQVAVLYQDVNCTEVPVAIHADQLTPTWRVYSTGSNVFQTRAGCL
IGAEHVNNSYECDIPIGAGICASYQTQTNSPSRAGSVASQSIIAYTMSLGAENSVAYSNNSIAIP
TNFTISVTTEILPVSMTKTSVDCTMYICGDSTECSNLLLQYGSFCTQLNRALTGIAVEQDKNTQE
VFAQVKQIYKTPPIKDFGGFNFSQILPDPSKPSKRSFIEDLLFNKVTLADAGFIKQYGDCLGDIA
ARDLICAQKFNGLTVLPPLLTDEMIAQYTSALLAGTITSGWTFGAGAALQIPFAMQMAYRFNGIG
VTQNVLYENQKLIANQFNSAIGKIQDSLSSTPSALGKLQDVVNQNAQALNTLVKQLSSNFGAISS
VLNDILSRLDKVEAEVQIDRLITGRLQSLQTYVTQQLIRAAEIRASANLAATKMSECVLGQSKRV
DFCGKGYHLMSFPQSAPHGVVFLHVTYVPAQEKNFTTAPAICHDGKAHFPREGVFVSNGTHWFVT
QRNFYEPQIITTDNTFVSGNCDVVIGIVNNTVYDPLQPELDSFKEELDKYFKNHTSPDVDLGDIS
GINASVVNIQKEIDRLNEVAKNLNESLIDLQELGKYEQGSGYIPEAPRDGQAYVRKDGEWVLLST
FLGRSLEVLFQGPGSLPETGGGSDYKDDDDKGGGGSGGGGSGGGGSGGGGSGGGGSHHHHHH
SEQ ID NO 49: SEQ ID NO 2 + A942P + T572I +
G880C + F888C
MFVFLVLLPLVSSQCVNLTTRTQLPPAYTNSFTRGVYYPDKVFRSSVLHSTQDLFLPFFSNVTWF
HAIHVSGTNGTKRFDNPVLPFNDGVYFASTEKSNIIRGWIFGTTLDSKTQSLLIVNNATNVVIKV
CEFQFCNDPFLGVYYHKNNKSWMESEFRVYSSANNCTFEYVSQPFLMDLEGKQGNFKNLREFVFK
NIDGYFKIYSKHTPINLVRDLPQGFSALEPLVDLPIGINITRFQTLLALHRSYLTPGDSSSGWTA
GAAAYYVGYLQPRTFLLKYNENGTITDAVDCALDPLSETKCTLKSFTVEKGIYQTSNFRVQPTES
IVRFPNITNLCPFGEVFNATRFASVYAWNRKRISNCVADYSVLYNSASFSTFKCYGVSPTKLNDL
CFTNVYADSFVIRGDEVRQIAPGQTGKIADYNYKLPDDFTGCVIAWNSNNLDSKVGGNYNYLYRL
FRKSNLKPFERDISTEIYQAGSTPCNGVEGFNCYFPLQSYGFQPTNGVGYQPYRVVVLSFELLHA
PATVCGPKKSTNLVKNKCVNFNFNGLTGTGVLTESNKKFLPFQQFGRDIADITDAVRDPQTLEIL
DITPCSFGGVSVITPGTNTSNQVAVLYQDVNCTEVPVAIHADQLTPTWRVYSTGSNVFQTRAGCL
IGAEHVNNSYECDIPIGAGICASYQTQTNSPSRAGSVASQSIIAYTMSLGAENSVAYSNNSIAIP
TNFTISVTTEILPVSMTKTSVDCTMYICGDSTECSNLLLQYGSFCTQLNRALTGIAVEQDKNTQE
VFAQVKQIYKTPPIKDFGGFNFSQILPDPSKPSKRSFIEDLLFNKVTLADAGFIKQYGDCLGDIA
ARDLICAQKFNGLTVLPPLLTDEMIAQYTSALLACTITSGWTCGAGAALQIPFAMQMAYRFNGIG
VTQNVLYENQKLIANQFNSAIGKIQDSLSSTPSALGKLQDVVNQNAQALNTLVKQLSSNFGAISS
VLNDILSRLDKVEAEVQIDRLITGRLQSLQTYVTQQLIRAAEIRASANLAATKMSECVLGQSKRV
DFCGKGYHLMSFPQSAPHGVVFLHVTYVPAQEKNFTTAPAICHDGKAHFPREGVFVSNGTHWFVT
QRNFYEPQIITTDNTFVSGNCDVVIGIVNNTVYDPLQPELDSFKEELDKYFKNHTSPDVDLGDIS
GINASVVNIQKEIDRLNEVAKNLNESLIDLQELGKYEQGSGYIPEAPRDGQAYVRKDGEWVLLST
FLGRSLEVLFQGPGSLPETGGGSDYKDDDDKGGGGSGGGGSGGGGSGGGGSGGGGSHHHHHH
SEQ ID NO 50: SEQ ID NO 2 + A942P + T572I +
S884C + A893C
MFVFLVLLPLVSSQCVNLTTRTQLPPAYTNSFTRGVYYPDKVFRSSVLHSTQDLFLPFFSNVTWF
HAIHVSGTNGTKRFDNPVLPFNDGVYFASTEKSNIIRGWIFGTTLDSKTQSLLIVNNATNVVIKV
CEFQFCNDPFLGVYYHKNNKSWMESEFRVYSSANNCTFEYVSQPFLMDLEGKQGNFKNLREFVFK
NIDGYFKIYSKHTPINLVRDLPQGFSALEPLVDLPIGINITRFQTLLALHRSYLTPGDSSSGWTA
GAAAYYVGYLQPRTFLLKYNENGTITDAVDCALDPLSETKCTLKSFTVEKGIYQTSNFRVQPTES
IVRFPNITNLCPFGEVFNATRFASVYAWNRKRISNCVADYSVLYNSASFSTFKCYGVSPTKLNDL
CFTNVYADSFVIRGDEVRQIAPGQTGKIADYNYKLPDDFTGCVIAWNSNNLDSKVGGNYNYLYRL
FRKSNLKPFERDISTEIYQAGSTPCNGVEGFNCYFPLQSYGFQPTNGVGYQPYRVVVLSFELLHA
PATVCGPKKSTNLVKNKCVNFNFNGLTGTGVLTESNKKFLPFQQFGRDIADITDAVRDPQTLEIL
DITPCSFGGVSVITPGTNTSNQVAVLYQDVNCTEVPVAIHADQLTPTWRVYSTGSNVFQTRAGCL
IGAEHVNNSYECDIPIGAGICASYQTQTNSPSRAGSVASQSIIAYTMSLGAENSVAYSNNSIAIP
TNFTISVTTEILPVSMTKTSVDCTMYICGDSTECSNLLLQYGSFCTQLNRALTGIAVEQDKNTQE
VFAQVKQIYKTPPIKDFGGFNFSQILPDPSKPSKRSFIEDLLFNKVTLADAGFIKQYGDCLGDIA
ARDLICAQKFNGLTVLPPLLTDEMIAQYTSALLAGTITCGWTFGAGACLQIPFAMQMAYRFNGIG
VTQNVLYENQKLIANQFNSAIGKIQDSLSSTPSALGKLQDVVNQNAQALNTLVKQLSSNFGAISS
VLNDILSRLDKVEAEVQIDRLITGRLQSLQTYVTQQLIRAAEIRASANLAATKMSECVLGQSKRV
DFCGKGYHLMSFPQSAPHGVVFLHVTYVPAQEKNFTTAPAICHDGKAHFPREGVFVSNGTHWFVT
QRNFYEPQIITTDNTFVSGNCDVVIGIVNNTVYDPLQPELDSFKEELDKYFKNHTSPDVDLGDIS
GINASVVNIQKEIDRLNEVAKNLNESLIDLQELGKYEQGSGYIPEAPRDGQAYVRKDGEWVLLST
FLGRSLEVLFQGPGSLPETGGGSDYKDDDDKGGGGSGGGGSGGGGGGGGSGGGGSHHHHHH
SEQ ID NO 51: SEQ ID NO 2 + A942P + N532P + G880C + F888C
MFVFLVLLPLVSSQCVNLTTRTQLPPAYTNSFTRGVYYPDKVFRSSVLHSTQDLFLPFFSNVTWF
HAIHVSGTNGTKRFDNPVLPFNDGVYFASTEKSNIIRGWIFGTTLDSKTQSLLIVNNATNVVIKV
CEFQFCNDPFLGVYYHKNNKSWMESEFRVYSSANNCTFEYVSQPFLMDLEGKQGNFKNLREFVFK
NIDGYFKIYSKHTPINLVRDLPQGFSALEPLVDLPIGINITRFQTLLALHRSYLTPGDSSSGWTA
GAAAYYVGYLQPRTFLLKYNENGTITDAVDCALDPLSETKCTLKSFTVEKGIYQTSNFRVQPTES
IVRFPNITNLCPFGEVFNATRFASVYAWNRKRISNCVADYSVLYNSASFSTFKCYGVSPTKLNDL
CFTNVYADSFVIRGDEVRQIAPGQTGKIADYNYKLPDDFTGCVIAWNSNNLDSKVGGNYNYLYRL
FRKSNLKPFERDISTEIYQAGSTPCNGVEGFNCYFPLQSYGFQPTNGVGYQPYRVVVLSFELLHA
PATVCGPKKSTPLVKNKCVNFNFNGLTGTGVLTESNKKFLPFQQFGRDIADTTDAVRDPQTLEIL
DITPCSFGGVSVITPGTNTSNQVAVLYQDVNCTEVPVAIHADQLTPTWRVYSTGSNVFQTRAGCL
IGAEHVNNSYECDIPIGAGICASYQTQTNSPSRAGSVASQSIIAYTMSLGAENSVAYSNNSIAIP
TNFTISVTTEILPVSMTKTSVDCTMYICGDSTECSNLLLQYGSFCTQLNRALTGIAVEQDKNTQE
VFAQVKQIYKTPPIKDFGGFNFSQILPDPSKPSKRSFIEDLLFNKVTLADAGFIKQYGDCLGDIA
ARDLICAQKFNGLTVLPPLLTDEMIAQYTSALLACTITSGWTCGAGAALQIPFAMQMAYRFNGIG
VTQNVLYENQKLIANQFNSAIGKIQDSLSSTPSALGKLQDVVNQNAQALNTLVKQLSSNFGAISS
VLNDILSRLDKVEAEVQIDRLITGRLQSLQTYVTQQLIRAAEIRASANLAATKMSECVLGQSKRV
DFCGKGYHLMSFPQSAPHGVVFLHVTYVPAQEKNFTTAPAICHDGKAHFPREGVFVSNGTHWFVT
QRNFYEPQIITTDNTFVSGNCDVVIGIVNNTVYDPLQPELDSFKEELDKYFKNHTSPDVDLGDIS
GINASVVNIQKEIDRLNEVAKNLNESLIDLQELGKYEQGSGYIPEAPRDGQAYVRKDGEWVLLST
FLGRSLEVLFQGPGSLPETGGGSDYKDDDDKGGGGSGGGGSGGGGSGGGGSGGGGSHHHHHH
SEQ ID NO 52: SEQ ID NO 2 + A942P + N532P + S884C + A893C
MFVFLVLLPLVSSQCVNLTTRTQLPPAYTNSFTRGVYYPDKVFRSSVLHSTQDLFLPFFSNVTWF
HAIHVSGTNGTKRFDNPVLPFNDGVYFASTEKSNIIRGWIFGTTLDSKTQSLLIVNNATNVVIKV
CEFQFCNDPFLGVYYHKNNKSWMESEFRVYSSANNCTFEYVSQPFLMDLEGKQGNFKNLREFVFK
NIDGYFKIYSKHTPINLVRDLPQGFSALEPLVDLPIGINITRFQTLLALHRSYLTPGDSSSGWTA
GAAAYYVGYLQPRTFLLKYNENGTITDAVDCALDPLSETKCTLKSFTVEKGIYQTSNFRVQPTES
IVRFPNITNLCPFGEVFNATRFASVYAWNRKRISNCVADYSVLYNSASFSTFKCYGVSPTKLNDL
CFTNVYADSFVIRGDEVRQIAPGQTGKIADYNYKLPDDFTGCVIAWNSNNLDSKVGGNYNYLYRL
FRKSNLKPFERDISTEIYQAGSTPCNGVEGFNCYFPLQSYGFQPTNGVGYQPYRVVVLSFELLHA
PATVCGPKKSTPLVKNKCVNFNFNGLTGTGVLTESNKKFLPFQQFGRDIADTTDAVRDPQTLEIL
DITPCSFGGVSVITPGTNTSNQVAVLYQDVNCTEVPVAIHADQLTPTWRVYSTGSNVFQTRAGCL
IGAEHVNNSYECDIPIGAGICASYQTQTNSPSRAGSVASQSIIAYTMSLGAENSVAYSNNSIAIP
TNFTISVTTEILPVSMTKTSVDCTMYICGDSTECSNLLLQYGSFCTQLNRALTGIAVEQDKNTQE
VFAQVKQIYKTPPIKDFGGFNFSQILPDPSKPSKRSFIEDLLFNKVTLADAGFIKQYGDCLGDIA
ARDLICAQKFNGLTVLPPLLTDEMIAQYTSALLAGTITCGWTFGAGACLQIPFAMQMAYRFNGIG
VTQNVLYENQKLIANQFNSAIGKIQDSLSSTPSALGKLQDVVNQNAQALNTLVKQLSSNFGAISS
VLNDILSRLDKVEAEVQIDRLITGRLQSLQTYVTQQLIRAAEIRASANLAATKMSECVLGQSKRV
DFCGKGYHLMSFPQSAPHGVVFLHVTYVPAQEKNFTTAPAICHDGKAHFPREGVFVSNGTHWFVT
QRNFYEPQIITTDNTFVSGNCDVVIGIVNNTVYDPLQPELDSFKEELDKYFKNHTSPDVDLGDIS
GINASVVNIQKEIDRLNEVAKNLNESLIDLQELGKYEQGSGYIPEAPRDGQAYVRKDGEWVLLST
FLGRSLEVLFQGPGSLPETGGGSDYKDDDDKGGGGSGGGGSGGGGSGGGGSGGGGSHHHHHH
SEQ ID NO 53: SEQ ID NO 2 + A892P + D614N + T572I
MFVFLVLLPLVSSQCVNLTTRTQLPPAYTNSFTRGVYYPDKVFRSSVLHSTQDLFLPFFSNVTWF
HAIHVSGTNGTKRFDNPVLPFNDGVYFASTEKSNIIRGWIFGTTLDSKTQSLLIVNNATNVVIKV
CEFQFCNDPFLGVYYHKNNKSWMESEFRVYSSANNCTFEYVSQPFLMDLEGKQGNFKNLREFVFK
NIDGYFKIYSKHTPINLVRDLPQGFSALEPLVDLPIGINITRFQTLLALHRSYLTPGDSSSGWTA
GAAAYYVGYLQPRTFLLKYNENGTITDAVDCALDPLSETKCTLKSFTVEKGIYQTSNFRVQPTES
IVRFPNITNLCPFGEVFNATRFASVYAWNRKRISNCVADYSVLYNSASFSTFKCYGVSPTKLNDL
CFTNVYADSFVIRGDEVRQIAPGQTGKIADYNYKLPDDFTGCVIAWNSNNLDSKVGGNYNYLYRL
FRKSNLKPFERDISTEIYQAGSTPCNGVEGFNCYFPLQSYGFQPTNGVGYQPYRVVVLSFELLHA
PATVCGPKKSTNLVKNKCVNFNFNGLTGTGVLTESNKKFLPFQQFGRDIADITDAVRDPQTLEIL
DITPCSFGGVSVITPGTNTSNQVAVLYQNVNCTEVPVAIHADQLTPTWRVYSTGSNVFQTRAGCL
IGAEHVNNSYECDIPIGAGICASYQTQTNSPSRAGSVASQSIIAYTMSLGAENSVAYSNNSIAIP
TNFTISVTTEILPVSMTKTSVDCTMYICGDSTECSNLLLQYGSFCTQLNRALTGIAVEQDKNTQE
VFAQVKQIYKTPPIKDFGGFNFSQILPDPSKPSKRSFIEDLLFNKVTLADAGFIKQYGDCLGDIA
ARDLICAQKFNGLTVLPPLLTDEMIAQYTSALLAGTITSGWTFGAGPALQIPFAMQMAYRFNGIG
VTQNVLYENQKLIANQFNSAIGKIQDSLSSTASALGKLQDVVNQNAQALNTLVKQLSSNFGAISS
VLNDILSRLDKVEAEVQIDRLITGRLQSLQTYVTQQLIRAAEIRASANLAATKMSECVLGQSKRV
DFCGKGYHLMSFPQSAPHGVVFLHVTYVPAQEKNFTTAPAICHDGKAHFPREGVFVSNGTHWFVT
QRNFYEPQIITTDNTFVSGNCDVVIGIVNNTVYDPLQPELDSFKEELDKYFKNHTSPDVDLGDIS
GINASVVNIQKEIDRLNEVAKNLNESLIDLQELGKYEQGSGYIPEAPRDGQAYVRKDGEWVLLST
FLGRSLEVLFQGPGSLPETGGGSDYKDDDDKGGGGSGGGGSGGGGSGGGGSGGGGSHHHHHH
SEQ ID NO 54: SEQ ID NO 2 + A892P + D614N + N532P
MFVFLVLLPLVSSQCVNLTTRTQLPPAYTNSFTRGVYYPDKVFRSSVLHSTQDLFLPFFSNVTWF
HAIHVSGTNGTKRFDNPVLPFNDGVYFASTEKSNIIRGWIFGTTLDSKTQSLLIVNNATNVVIKV
CEFQFCNDPFLGVYYHKNNKSWMESEFRVYSSANNCTFEYVSQPFLMDLEGKQGNFKNLREFVFK
NIDGYFKIYSKHTPINLVRDLPQGFSALEPLVDLPIGINITRFQTLLALHRSYLTPGDSSSGWTA
GAAAYYVGYLQPRTFLLKYNENGTITDAVDCALDPLSETKCTLKSFTVEKGIYQTSNFRVQPTES
IVRFPNITNLCPFGEVFNATRFASVYAWNRKRISNCVADYSVLYNSASFSTFKCYGVSPTKLNDL
CFTNVYADSFVIRGDEVRQIAPGQTGKIADYNYKLPDDFTGCVIAWNSNNLDSKVGGNYNYLYRL
FRKSNLKPFERDISTEIYQAGSTPCNGVEGFNCYFPLQSYGFQPTNGVGYQPYRVVVLSFELLHA
PATVCGPKKSTPLVKNKCVNFNFNGLTGTGVLTESNKKFLPFQQFGRDIADTTDAVRDPQTLEIL
DITPCSFGGVSVITPGTNTSNQVAVLYQNVNCTEVPVAIHADQLTPTWRVYSTGSNVFQTRAGCL
IGAEHVNNSYECDIPIGAGICASYQTQTNSPSRAGSVASQSIIAYTMSLGAENSVAYSNNSIAIP
TNFTISVTTEILPVSMTKTSVDCTMYICGDSTECSNLLLQYGSFCTQLNRALTGIAVEQDKNTQE
VFAQVKQIYKTPPIKDFGGFNFSQILPDPSKPSKRSFIEDLLFNKVTLADAGFIKQYGDCLGDIA
ARDLICAQKFNGLTVLPPLLTDEMIAQYTSALLAGTITSGWTFGAGPALQIPFAMQMAYRFNGIG
VTQNVLYENQKLIANQFNSAIGKIQDSLSSTASALGKLQDVVNQNAQALNTLVKQLSSNFGAISS
VLNDILSRLDKVEAEVQIDRLITGRLQSLQTYVTQQLIRAAEIRASANLAATKMSECVLGQSKRV
DFCGKGYHLMSFPQSAPHGVVFLHVTYVPAQEKNFTTAPAICHDGKAHFPREGVFVSNGTHWFVT
QRNFYEPQIITTDNTFVSGNCDVVIGIVNNTVYDPLQPELDSFKEELDKYFKNHTSPDVDLGDIS
GINASVVNIQKEIDRLNEVAKNLNESLIDLQELGKYEQGSGYIPEAPRDGQAYVRKDGEWVLLST
FLGRSLEVLFQGPGSLPETGGGSDYKDDDDKGGGGSGGGGSGGGGSGGGGSGGGGSHHHHHH
SEQ ID NO 55: SEQ ID NO 2 + A892P + D614N + G880C + F888C
MFVFLVLLPLVSSQCVNLTTRTQLPPAYTNSFTRGVYYPDKVFRSSVLHSTQDLFLPFFSNVTWF
HAIHVSGTNGTKRFDNPVLPFNDGVYFASTEKSNIIRGWIFGTTLDSKTQSLLIVNNATNVVIKV
CEFQFCNDPFLGVYYHKNNKSWMESEFRVYSSANNCTFEYVSQPFLMDLEGKQGNFKNLREFVFK
NIDGYFKIYSKHTPINLVRDLPQGFSALEPLVDLPIGINITRFQTLLALHRSYLTPGDSSSGWTA
GAAAYYVGYLQPRTFLLKYNENGTITDAVDCALDPLSETKCTLKSFTVEKGIYQTSNFRVQPTES
IVRFPNITNLCPFGEVFNATRFASVYAWNRKRISNCVADYSVLYNSASFSTFKCYGVSPTKLNDL
CFTNVYADSFVIRGDEVRQIAPGQTGKIADYNYKLPDDFTGCVIAWNSNNLDSKVGGNYNYLYRL
FRKSNLKPFERDISTEIYQAGSTPCNGVEGFNCYFPLQSYGFQPTNGVGYQPYRVVVLSFELLHA
PATVCGPKKSTNLVKNKCVNFNFNGLTGTGVLTESNKKFLPFQQFGRDIADTTDAVRDPQTLEIL
DITPCSFGGVSVITPGTNTSNQVAVLYQNVNCTEVPVAIHADQLTPTWRVYSTGSNVFQTRAGCL
IGAEHVNNSYECDIPIGAGICASYQTQTNSPSRAGSVASQSIIAYTMSLGAENSVAYSNNSIAIP
TNFTISVTTEILPVSMTKTSVDCTMYICGDSTECSNLLLQYGSFCTQLNRALTGIAVEQDKNTQE
VFAQVKQIYKTPPIKDFGGFNFSQILPDPSKPSKRSFIEDLLFNKVTLADAGFIKQYGDCLGDIA
ARDLICAQKFNGLTVLPPLLTDEMIAQYTSALLACTITSGWTCGAGPALQIPFAMQMAYRFNGIG
VTQNVLYENQKLIANQFNSAIGKIQDSLSSTASALGKLQDVVNQNAQALNTLVKQLSSNFGAISS
VLNDILSRLDKVEAEVQIDRLITGRLQSLQTYVTQQLIRAAEIRASANLAATKMSECVLGQSKRV
DFCGKGYHLMSFPQSAPHGVVFLHVTYVPAQEKNFTTAPAICHDGKAHFPREGVFVSNGTHWFVT
QRNFYEPQIITTDNTFVSGNCDVVIGIVNNTVYDPLQPELDSFKEELDKYFKNHTSPDVDLGDIS
GINASVVNIQKEIDRLNEVAKNLNESLIDLQELGKYEQGSGYIPEAPRDGQAYVRKDGEWVLLST
FLGRSLEVLFQGPGSLPETGGGSDYKDDDDKGGGGSGGGGSGGGGSGGGGSGGGGSHHHHHH
SEQ ID NO 56: SEQ ID NO 2 + A892P + D614N + S884C + A893C
MFVFLVLLPLVSSQCVNLTTRTQLPPAYTNSFTRGVYYPDKVFRSSVLHSTQDLFLPFFSNVTWF
HAIHVSGTNGTKRFDNPVLPFNDGVYFASTEKSNIIRGWIFGTTLDSKTQSLLIVNNATNVVIKV
CEFQFCNDPFLGVYYHKNNKSWMESEFRVYSSANNCTFEYVSQPFLMDLEGKQGNFKNLREFVFK
NIDGYFKIYSKHTPINLVRDLPQGFSALEPLVDLPIGINITRFQTLLALHRSYLTPGDSSSGWTA
GAAAYYVGYLQPRTFLLKYNENGTITDAVDCALDPLSETKCTLKSFTVEKGIYQTSNFRVQPTES
IVRFPNITNLCPFGEVFNATRFASVYAWNRKRISNCVADYSVLYNSASFSTFKCYGVSPTKLNDL
CFTNVYADSFVIRGDEVRQIAPGQTGKIADYNYKLPDDFTGCVIAWNSNNLDSKVGGNYNYLYRL
FRKSNLKPFERDISTEIYQAGSTPCNGVEGFNCYFPLQSYGFQPTNGVGYQPYRVVVLSFELLHA
PATVCGPKKSTNLVKNKCVNFNFNGLTGTGVLTESNKKFLPFQQFGRDIADTTDAVRDPQTLEIL
DITPCSFGGVSVITPGTNTSNQVAVLYQNVNCTEVPVAIHADQLTPTWRVYSTGSNVFQTRAGCL
IGAEHVNNSYECDIPIGAGICASYQTQTNSPSRAGSVASQSIIAYTMSLGAENSVAYSNNSIAIP
TNFTISVTTEILPVSMTKTSVDCTMYICGDSTECSNLLLQYGSFCTQLNRALTGIAVEQDKNTQE
VFAQVKQIYKTPPIKDFGGFNFSQILPDPSKPSKRSFIEDLLFNKVTLADAGFIKQYGDCLGDIA
ARDLICAQKFNGLTVLPPLLTDEMIAQYTSALLAGTITCGWTFGAGPCLQIPFAMQMAYRFNGIG
VTQNVLYENQKLIANQFNSAIGKIQDSLSSTASALGKLQDVVNQNAQALNTLVKQLSSNFGAISS
VLNDILSRLDKVEAEVQIDRLITGRLQSLQTYVTQQLIRAAEIRASANLAATKMSECVLGQSKRV
DFCGKGYHLMSFPQSAPHGVVFLHVTYVPAQEKNFTTAPAICHDGKAHFPREGVFVSNGTHWFVT
QRNFYEPQIITTDNTFVSGNCDVVIGIVNNTVYDPLQPELDSFKEELDKYFKNHTSPDVDLGDIS
GINASVVNIQKEIDRLNEVAKNLNESLIDLQELGKYEQGSGYIPEAPRDGQAYVRKDGEWVLLST
FLGRSLEVLFQGPGSLPETGGGSDYKDDDDKGGGGSGGGGSGGGGSGGGGSGGGGSHHHHHH
SEQ ID NO 57: SEQ ID NO 2 + A892P + T572I +
N532P
MFVFLVLLPLVSSQCVNLTTRTQLPPAYTNSFTRGVYYPDKVFRSSVLHSTQDLFLPFFSNVTWF
HAIHVSGTNGTKRFDNPVLPFNDGVYFASTEKSNIIRGWIFGTTLDSKTQSLLIVNNATNVVIKV
CEFQFCNDPFLGVYYHKNNKSWMESEFRVYSSANNCTFEYVSQPFLMDLEGKQGNFKNLREFVFK
NIDGYFKIYSKHTPINLVRDLPQGFSALEPLVDLPIGINITRFQTLLALHRSYLTPGDSSSGWTA
GAAAYYVGYLQPRTFLLKYNENGTITDAVDCALDPLSETKCTLKSFTVEKGIYQTSNFRVQPTES
IVRFPNITNLCPFGEVFNATRFASVYAWNRKRISNCVADYSVLYNSASFSTFKCYGVSPTKLNDL
CFTNVYADSFVIRGDEVRQIAPGQTGKIADYNYKLPDDFTGCVIAWNSNNLDSKVGGNYNYLYRL
FRKSNLKPFERDISTEIYQAGSTPCNGVEGFNCYFPLQSYGFQPTNGVGYQPYRVVVLSFELLHA
PATVCGPKKSTPLVKNKCVNFNFNGLTGTGVLTESNKKFLPFQQFGRDIADITDAVRDPQTLEIL
DITPCSFGGVSVITPGTNTSNQVAVLYQDVNCTEVPVAIHADQLTPTWRVYSTGSNVFQTRAGCL
IGAEHVNNSYECDIPIGAGICASYQTQTNSPSRAGSVASQSIIAYTMSLGAENSVAYSNNSIAIP
TNFTISVTTEILPVSMTKTSVDCTMYICGDSTECSNLLLQYGSFCTQLNRALTGIAVEQDKNTQE
VFAQVKQIYKTPPIKDFGGFNFSQILPDPSKPSKRSFIEDLLFNKVTLADAGFIKQYGDCLGDIA
ARDLICAQKFNGLTVLPPLLTDEMIAQYTSALLAGTITSGWTFGAGPALQIPFAMQMAYRFNGIG
VTQNVLYENQKLIANQFNSAIGKIQDSLSSTASALGKLQDVVNQNAQALNTLVKQLSSNFGAISS
VLNDILSRLDKVEAEVQIDRLITGRLQSLQTYVTQQLIRAAEIRASANLAATKMSECVLGQSKRV
DFCGKGYHLMSFPQSAPHGVVFLHVTYVPAQEKNFTTAPAICHDGKAHFPREGVFVSNGTHWFVT
QRNFYEPQIITTDNTFVSGNCDVVIGIVNNTVYDPLQPELDSFKEELDKYFKNHTSPDVDLGDIS
GINASVVNIQKEIDRLNEVAKNLNESLIDLQELGKYEQGSGYIPEAPRDGQAYVRKDGEWVLLST
FLGRSLEVLFQGPGSLPETGGGSDYKDDDDKGGGGSGGGGSGGGGSGGGGSGGGGSHHHHHH
SEQ ID NO 58: SEQ ID NO 2 + A892P + T572I +
G880C + F888C
MFVFLVLLPLVSSQCVNLTTRTQLPPAYTNSFTRGVYYPDKVFRSSVLHSTQDLFLPFFSNVTWF
HAIHVSGTNGTKRFDNPVLPFNDGVYFASTEKSNIIRGWIFGTTLDSKTQSLLIVNNATNVVIKV
CEFQFCNDPFLGVYYHKNNKSWMESEFRVYSSANNCTFEYVSQPFLMDLEGKQGNFKNLREFVFK
NIDGYFKIYSKHTPINLVRDLPQGFSALEPLVDLPIGINITRFQTLLALHRSYLTPGDSSSGWTA
GAAAYYVGYLQPRTFLLKYNENGTITDAVDCALDPLSETKCTLKSFTVEKGIYQTSNFRVQPTES
IVRFPNITNLCPFGEVFNATRFASVYAWNRKRISNCVADYSVLYNSASFSTFKCYGVSPTKLNDL
CFTNVYADSFVIRGDEVRQIAPGQTGKIADYNYKLPDDFTGCVIAWNSNNLDSKVGGNYNYLYRL
FRKSNLKPFERDISTEIYQAGSTPCNGVEGFNCYFPLQSYGFQPTNGVGYQPYRVVVLSFELLHA
PATVCGPKKSTNLVKNKCVNFNFNGLTGTGVLTESNKKFLPFQQFGRDIADITDAVRDPQTLEIL
DITPCSFGGVSVITPGTNTSNQVAVLYQDVNCTEVPVAIHADQLTPTWRVYSTGSNVFQTRAGCL
IGAEHVNNSYECDIPIGAGICASYQTQTNSPSRAGSVASQSIIAYTMSLGAENSVAYSNNSIAIP
TNFTISVTTEILPVSMTKTSVDCTMYICGDSTECSNLLLQYGSFCTQLNRALTGIAVEQDKNTQE
VFAQVKQIYKTPPIKDFGGFNFSQILPDPSKPSKRSFIEDLLFNKVTLADAGFIKQYGDCLGDIA
ARDLICAQKFNGLTVLPPLLTDEMIAQYTSALLACTITSGWTCGAGPALQIPFAMQMAYRFNGIG
VTQNVLYENQKLIANQFNSAIGKIQDSLSSTASALGKLQDVVNQNAQALNTLVKQLSSNFGAISS
VLNDILSRLDKVEAEVQIDRLITGRLQSLQTYVTQQLIRAAEIRASANLAATKMSECVLGQSKRV
DFCGKGYHLMSFPQSAPHGVVFLHVTYVPAQEKNFTTAPAICHDGKAHFPREGVFVSNGTHWFVT
QRNFYEPQIITTDNTFVSGNCDVVIGIVNNTVYDPLQPELDSFKEELDKYFKNHTSPDVDLGDIS
GINASVVNIQKEIDRLNEVAKNLNESLIDLQELGKYEQGSGYIPEAPRDGQAYVRKDGEWVLLST
FLGRSLEVLFQGPGSLPETGGGSDYKDDDDKGGGGSGGGGSGGGGSGGGGSGGGGSHHHHHH
SEQ ID NO 59: SEQ ID NO 2 + A892P + T572I +
S884C + A893C
MFVFLVLLPLVSSQCVNLTTRTQLPPAYTNSFTRGVYYPDKVFRSSVLHSTQDLFLPFFSNVTWF
HAIHVSGTNGTKRFDNPVLPFNDGVYFASTEKSNIIRGWIFGTTLDSKTQSLLIVNNATNVVIKV
CEFQFCNDPFLGVYYHKNNKSWMESEFRVYSSANNCTFEYVSQPFLMDLEGKQGNFKNLREFVFK
NIDGYFKIYSKHTPINLVRDLPQGFSALEPLVDLPIGINITRFQTLLALHRSYLTPGDSSSGWTA
GAAAYYVGYLQPRTFLLKYNENGTITDAVDCALDPLSETKCTLKSFTVEKGIYQTSNFRVQPTES
IVRFPNITNLCPFGEVFNATRFASVYAWNRKRISNCVADYSVLYNSASFSTFKCYGVSPTKLNDL
CFTNVYADSFVIRGDEVRQIAPGQTGKIADYNYKLPDDFTGCVIAWNSNNLDSKVGGNYNYLYRL
FRKSNLKPFERDISTEIYQAGSTPCNGVEGFNCYFPLQSYGFQPTNGVGYQPYRVVVLSFELLHA
PATVCGPKKSTNLVKNKCVNFNFNGLTGTGVLTESNKKFLPFQQFGRDIADITDAVRDPQTLEIL
DITPCSFGGVSVITPGTNTSNQVAVLYQDVNCTEVPVAIHADQLTPTWRVYSTGSNVFQTRAGCL
IGAEHVNNSYECDIPIGAGICASYQTQTNSPSRAGSVASQSIIAYTMSLGAENSVAYSNNSIAIP
TNFTISVTTEILPVSMTKTSVDCTMYICGDSTECSNLLLQYGSFCTQLNRALTGIAVEQDKNTQE
VFAQVKQIYKTPPIKDFGGFNFSQILPDPSKPSKRSFIEDLLFNKVTLADAGFIKQYGDCLGDIA
ARDLICAQKFNGLTVLPPLLTDEMIAQYTSALLAGTITCGWTFGAGPCLQIPFAMQMAYRFNGIG
VTQNVLYENQKLIANQFNSAIGKIQDSLSSTASALGKLQDVVNQNAQALNTLVKQLSSNFGAISS
VLNDILSRLDKVEAEVQIDRLITGRLQSLQTYVTQQLIRAAEIRASANLAATKMSECVLGQSKRV
DFCGKGYHLMSFPQSAPHGVVFLHVTYVPAQEKNFTTAPAICHDGKAHFPREGVFVSNGTHWFVT
QRNFYEPQIITTDNTFVSGNCDVVIGIVNNTVYDPLQPELDSFKEELDKYFKNHTSPDVDLGDIS
GINASVVNIQKEIDRLNEVAKNLNESLIDLQELGKYEQGSGYIPEAPRDGQAYVRKDGEWVLLST
FLGRSLEVLFQGPGSLPETGGGSDYKDDDDKGGGGSGGGGSGGGGGGGGSGGGGSHHHHHH
SEQ ID NO 60: SEQ ID NO 2 + A892P + N532P + G880C + F888C
MFVFLVLLPLVSSQCVNLTTRTQLPPAYTNSFTRGVYYPDKVFRSSVLHSTQDLFLPFFSNVTWF
HAIHVSGTNGTKRFDNPVLPFNDGVYFASTEKSNIIRGWIFGTTLDSKTQSLLIVNNATNVVIKV
CEFQFCNDPFLGVYYHKNNKSWMESEFRVYSSANNCTFEYVSQPFLMDLEGKQGNFKNLREFVFK
NIDGYFKIYSKHTPINLVRDLPQGFSALEPLVDLPIGINITRFQTLLALHRSYLTPGDSSSGWTA
GAAAYYVGYLQPRTFLLKYNENGTITDAVDCALDPLSETKCTLKSFTVEKGIYQTSNFRVQPTES
IVRFPNITNLCPFGEVFNATRFASVYAWNRKRISNCVADYSVLYNSASFSTFKCYGVSPTKLNDL
CFTNVYADSFVIRGDEVRQIAPGQTGKIADYNYKLPDDFTGCVIAWNSNNLDSKVGGNYNYLYRL
FRKSNLKPFERDISTEIYQAGSTPCNGVEGFNCYFPLQSYGFQPTNGVGYQPYRVVVLSFELLHA
PATVCGPKKSTPLVKNKCVNFNFNGLTGTGVLTESNKKFLPFQQFGRDIADTTDAVRDPQTLEIL
DITPCSFGGVSVITPGTNTSNQVAVLYQDVNCTEVPVAIHADQLTPTWRVYSTGSNVFQTRAGCL
IGAEHVNNSYECDIPIGAGICASYQTQTNSPSRAGSVASQSIIAYTMSLGAENSVAYSNNSIAIP
TNFTISVTTEILPVSMTKTSVDCTMYICGDSTECSNLLLQYGSFCTQLNRALTGIAVEQDKNTQE
VFAQVKQIYKTPPIKDFGGFNFSQILPDPSKPSKRSFIEDLLFNKVTLADAGFIKQYGDCLGDIA
ARDLICAQKFNGLTVLPPLLTDEMIAQYTSALLACTITSGWTCGAGPALQIPFAMQMAYRFNGIG
VTQNVLYENQKLIANQFNSAIGKIQDSLSSTASALGKLQDVVNQNAQALNTLVKQLSSNFGAISS
VLNDILSRLDKVEAEVQIDRLITGRLQSLQTYVTQQLIRAAEIRASANLAATKMSECVLGQSKRV
DFCGKGYHLMSFPQSAPHGVVFLHVTYVPAQEKNFTTAPAICHDGKAHFPREGVFVSNGTHWFVT
QRNFYEPQIITTDNTFVSGNCDVVIGIVNNTVYDPLQPELDSFKEELDKYFKNHTSPDVDLGDIS
GINASVVNIQKEIDRLNEVAKNLNESLIDLQELGKYEQGSGYIPEAPRDGQAYVRKDGEWVLLST
FLGRSLEVLFQGPGSLPETGGGSDYKDDDDKGGGGSGGGGSGGGGSGGGGSGGGGSHHHHHH
SEQ ID NO 61: SEQ ID NO 2 + A892P + N532P + S884C + A893C
MFVFLVLLPLVSSQCVNLTTRTQLPPAYTNSFTRGVYYPDKVFRSSVLHSTQDLFLPFFSNVTWF
HAIHVSGTNGTKRFDNPVLPFNDGVYFASTEKSNIIRGWIFGTTLDSKTQSLLIVNNATNVVIKV
CEFQFCNDPFLGVYYHKNNKSWMESEFRVYSSANNCTFEYVSQPFLMDLEGKQGNFKNLREFVFK
NIDGYFKIYSKHTPINLVRDLPQGFSALEPLVDLPIGINITRFQTLLALHRSYLTPGDSSSGWTA
GAAAYYVGYLQPRTFLLKYNENGTITDAVDCALDPLSETKCTLKSFTVEKGIYQTSNFRVQPTES
IVRFPNITNLCPFGEVFNATRFASVYAWNRKRISNCVADYSVLYNSASFSTFKCYGVSPTKLNDL
CFTNVYADSFVIRGDEVRQIAPGQTGKIADYNYKLPDDFTGCVIAWNSNNLDSKVGGNYNYLYRL
FRKSNLKPFERDISTEIYQAGSTPCNGVEGFNCYFPLQSYGFQPTNGVGYQPYRVVVLSFELLHA
PATVCGPKKSTPLVKNKCVNFNFNGLTGTGVLTESNKKFLPFQQFGRDIADTTDAVRDPQTLEIL
DITPCSFGGVSVITPGTNTSNQVAVLYQDVNCTEVPVAIHADQLTPTWRVYSTGSNVFQTRAGCL
IGAEHVNNSYECDIPIGAGICASYQTQTNSPSRAGSVASQSIIAYTMSLGAENSVAYSNNSIAIP
TNFTISVTTEILPVSMTKTSVDCTMYICGDSTECSNLLLQYGSFCTQLNRALTGIAVEQDKNTQE
VFAQVKQIYKTPPIKDFGGFNFSQILPDPSKPSKRSFIEDLLFNKVTLADAGFIKQYGDCLGDIA
ARDLICAQKFNGLTVLPPLLTDEMIAQYTSALLAGTITCGWTFGAGPCLQIPFAMQMAYRFNGIG
VTQNVLYENQKLIANQFNSAIGKIQDSLSSTASALGKLQDVVNQNAQALNTLVKQLSSNFGAISS
VLNDILSRLDKVEAEVQIDRLITGRLQSLQTYVTQQLIRAAEIRASANLAATKMSECVLGQSKRV
DFCGKGYHLMSFPQSAPHGVVFLHVTYVPAQEKNFTTAPAICHDGKAHFPREGVFVSNGTHWFVT
QRNFYEPQIITTDNTFVSGNCDVVIGIVNNTVYDPLQPELDSFKEELDKYFKNHTSPDVDLGDIS
GINASVVNIQKEIDRLNEVAKNLNESLIDLQELGKYEQGSGYIPEAPRDGQAYVRKDGEWVLLST
FLGRSLEVLFQGPGSLPETGGGSDYKDDDDKGGGGSGGGGSGGGGSGGGGSGGGGSHHHHHH
SEQ ID NO 62: SEQ ID NO 2 + D614N + T572I +
N532P
MFVFLVLLPLVSSQCVNLTTRTQLPPAYTNSFTRGVYYPDKVFRSSVLHSTQDLFLPFFSNVTWF
HAIHVSGTNGTKRFDNPVLPFNDGVYFASTEKSNIIRGWIFGTTLDSKTQSLLIVNNATNVVIKV
CEFQFCNDPFLGVYYHKNNKSWMESEFRVYSSANNCTFEYVSQPFLMDLEGKQGNFKNLREFVFK
NIDGYFKIYSKHTPINLVRDLPQGFSALEPLVDLPIGINITRFQTLLALHRSYLTPGDSSSGWTA
GAAAYYVGYLQPRTFLLKYNENGTITDAVDCALDPLSETKCTLKSFTVEKGIYQTSNFRVQPTES
IVRFPNITNLCPFGEVFNATRFASVYAWNRKRISNCVADYSVLYNSASFSTFKCYGVSPTKLNDL
CFTNVYADSFVIRGDEVRQIAPGQTGKIADYNYKLPDDFTGCVIAWNSNNLDSKVGGNYNYLYRL
FRKSNLKPFERDISTEIYQAGSTPCNGVEGFNCYFPLQSYGFQPTNGVGYQPYRVVVLSFELLHA
PATVCGPKKSTPLVKNKCVNFNFNGLTGTGVLTESNKKFLPFQQFGRDIADITDAVRDPQTLEIL
DITPCSFGGVSVITPGTNTSNQVAVLYQNVNCTEVPVAIHADQLTPTWRVYSTGSNVFQTRAGCL
IGAEHVNNSYECDIPIGAGICASYQTQTNSPSRAGSVASQSIIAYTMSLGAENSVAYSNNSIAIP
TNFTISVTTEILPVSMTKTSVDCTMYICGDSTECSNLLLQYGSFCTQLNRALTGIAVEQDKNTQE
VFAQVKQIYKTPPIKDFGGFNFSQILPDPSKPSKRSFIEDLLFNKVTLADAGFIKQYGDCLGDIA
ARDLICAQKFNGLTVLPPLLTDEMIAQYTSALLAGTITSGWTFGAGAALQIPFAMQMAYRFNGIG
VTQNVLYENQKLIANQFNSAIGKIQDSLSSTASALGKLQDVVNQNAQALNTLVKQLSSNFGAISS
VLNDILSRLDKVEAEVQIDRLITGRLQSLQTYVTQQLIRAAEIRASANLAATKMSECVLGQSKRV
DFCGKGYHLMSFPQSAPHGVVFLHVTYVPAQEKNFTTAPAICHDGKAHFPREGVFVSNGTHWFVT
QRNFYEPQIITTDNTFVSGNCDVVIGIVNNTVYDPLQPELDSFKEELDKYFKNHTSPDVDLGDIS
GINASVVNIQKEIDRLNEVAKNLNESLIDLQELGKYEQGSGYIPEAPRDGQAYVRKDGEWVLLST
FLGRSLEVLFQGPGSLPETGGGSDYKDDDDKGGGGSGGGGSGGGGSGGGGSGGGGSHHHHHH
SEQ ID NO 63: SEQ ID NO 2 + D614N + T572I +
G880C + F888C
MFVFLVLLPLVSSQCVNLTTRTQLPPAYTNSFTRGVYYPDKVFRSSVLHSTQDLFLPFFSNVTWF
HAIHVSGTNGTKRFDNPVLPFNDGVYFASTEKSNIIRGWIFGTTLDSKTQSLLIVNNATNVVIKV
CEFQFCNDPFLGVYYHKNNKSWMESEFRVYSSANNCTFEYVSQPFLMDLEGKQGNFKNLREFVFK
NIDGYFKIYSKHTPINLVRDLPQGFSALEPLVDLPIGINITRFQTLLALHRSYLTPGDSSSGWTA
GAAAYYVGYLQPRTFLLKYNENGTITDAVDCALDPLSETKCTLKSFTVEKGIYQTSNFRVQPTES
IVRFPNITNLCPFGEVFNATRFASVYAWNRKRISNCVADYSVLYNSASFSTFKCYGVSPTKLNDL
CFTNVYADSFVIRGDEVRQIAPGQTGKIADYNYKLPDDFTGCVIAWNSNNLDSKVGGNYNYLYRL
FRKSNLKPFERDISTEIYQAGSTPCNGVEGFNCYFPLQSYGFQPTNGVGYQPYRVVVLSFELLHA
PATVCGPKKSTNLVKNKCVNFNFNGLTGTGVLTESNKKFLPFQQFGRDIADITDAVRDPQTLEIL
DITPCSFGGVSVITPGTNTSNQVAVLYQNVNCTEVPVAIHADQLTPTWRVYSTGSNVFQTRAGCL
IGAEHVNNSYECDIPIGAGICASYQTQTNSPSRAGSVASQSIIAYTMSLGAENSVAYSNNSIAIP
TNFTISVTTEILPVSMTKTSVDCTMYICGDSTECSNLLLQYGSFCTQLNRALTGIAVEQDKNTQE
VFAQVKQIYKTPPIKDFGGFNFSQILPDPSKPSKRSFIEDLLFNKVTLADAGFIKQYGDCLGDIA
ARDLICAQKFNGLTVLPPLLTDEMIAQYTSALLACTITSGWTCGAGAALQIPFAMQMAYRFNGIG
VTQNVLYENQKLIANQFNSAIGKIQDSLSSTASALGKLQDVVNQNAQALNTLVKQLSSNFGAISS
VLNDILSRLDKVEAEVQIDRLITGRLQSLQTYVTQQLIRAAEIRASANLAATKMSECVLGQSKRV
DFCGKGYHLMSFPQSAPHGVVFLHVTYVPAQEKNFTTAPAICHDGKAHFPREGVFVSNGTHWFVT
QRNFYEPQIITTDNTFVSGNCDVVIGIVNNTVYDPLQPELDSFKEELDKYFKNHTSPDVDLGDIS
GINASVVNIQKEIDRLNEVAKNLNESLIDLQELGKYEQGSGYIPEAPRDGQAYVRKDGEWVLLST
FLGRSLEVLFQGPGSLPETGGGSDYKDDDDKGGGGSGGGGSGGGGSGGGGSGGGGSHHHHHH
SEQ ID NO 64: SEQ ID NO 2 + D614N + T572I +
S884C + A893C
MFVFLVLLPLVSSQCVNLTTRTQLPPAYTNSFTRGVYYPDKVFRSSVLHSTQDLFLPFFSNVTWF
HAIHVSGTNGTKRFDNPVLPFNDGVYFASTEKSNIIRGWIFGTTLDSKTQSLLIVNNATNVVIKV
CEFQFCNDPFLGVYYHKNNKSWMESEFRVYSSANNCTFEYVSQPFLMDLEGKQGNFKNLREFVFK
NIDGYFKIYSKHTPINLVRDLPQGFSALEPLVDLPIGINITRFQTLLALHRSYLTPGDSSSGWTA
GAAAYYVGYLQPRTFLLKYNENGTITDAVDCALDPLSETKCTLKSFTVEKGIYQTSNFRVQPTES
IVRFPNITNLCPFGEVFNATRFASVYAWNRKRISNCVADYSVLYNSASFSTFKCYGVSPTKLNDL
CFTNVYADSFVIRGDEVRQIAPGQTGKIADYNYKLPDDFTGCVIAWNSNNLDSKVGGNYNYLYRL
FRKSNLKPFERDISTEIYQAGSTPCNGVEGFNCYFPLQSYGFQPTNGVGYQPYRVVVLSFELLHA
PATVCGPKKSTNLVKNKCVNFNFNGLTGTGVLTESNKKFLPFQQFGRDIADITDAVRDPQTLEIL
DITPCSFGGVSVITPGTNTSNQVAVLYQNVNCTEVPVAIHADQLTPTWRVYSTGSNVFQTRAGCL
IGAEHVNNSYECDIPIGAGICASYQTQTNSPSRAGSVASQSIIAYTMSLGAENSVAYSNNSIAIP
TNFTISVTTEILPVSMTKTSVDCTMYICGDSTECSNLLLQYGSFCTQLNRALTGIAVEQDKNTQE
VFAQVKQIYKTPPIKDFGGFNFSQILPDPSKPSKRSFIEDLLFNKVTLADAGFIKQYGDCLGDIA
ARDLICAQKFNGLTVLPPLLTDEMIAQYTSALLAGTITCGWTFGAGACLQIPFAMQMAYRFNGIG
VTQNVLYENQKLIANQFNSAIGKIQDSLSSTASALGKLQDVVNQNAQALNTLVKQLSSNFGAISS
VLNDILSRLDKVEAEVQIDRLITGRLQSLQTYVTQQLIRAAEIRASANLAATKMSECVLGQSKRV
DFCGKGYHLMSFPQSAPHGVVFLHVTYVPAQEKNFTTAPAICHDGKAHFPREGVFVSNGTHWFVT
QRNFYEPQIITTDNTFVSGNCDVVIGIVNNTVYDPLQPELDSFKEELDKYFKNHTSPDVDLGDIS
GINASVVNIQKEIDRLNEVAKNLNESLIDLQELGKYEQGSGYIPEAPRDGQAYVRKDGEWVLLST
FLGRSLEVLFQGPGSLPETGGGSDYKDDDDKGGGGSGGGGSGGGGSGGGGSGGGGSHHHHHH
SEQ ID NO 65: SEQ ID NO 2 + D614N + N532P + G880C + F888C
MFVFLVLLPLVSSQCVNLTTRTQLPPAYTNSFTRGVYYPDKVFRSSVLHSTQDLFLPFFSNVTWF
HAIHVSGTNGTKRFDNPVLPFNDGVYFASTEKSNIIRGWIFGTTLDSKTQSLLIVNNATNVVIKV
CEFQFCNDPFLGVYYHKNNKSWMESEFRVYSSANNCTFEYVSQPFLMDLEGKQGNFKNLREFVFK
NIDGYFKIYSKHTPINLVRDLPQGFSALEPLVDLPIGINITRFQTLLALHRSYLTPGDSSSGWTA
GAAAYYVGYLQPRTFLLKYNENGTITDAVDCALDPLSETKCTLKSFTVEKGIYQTSNFRVQPTES
IVRFPNITNLCPFGEVFNATRFASVYAWNRKRISNCVADYSVLYNSASFSTFKCYGVSPTKLNDL
CFTNVYADSFVIRGDEVRQIAPGQTGKIADYNYKLPDDFTGCVIAWNSNNLDSKVGGNYNYLYRL
FRKSNLKPFERDISTEIYQAGSTPCNGVEGFNCYFPLQSYGFQPTNGVGYQPYRVVVLSFELLHA
PATVCGPKKSTPLVKNKCVNFNFNGLTGTGVLTESNKKFLPFQQFGRDIADTTDAVRDPQTLEIL
DITPCSFGGVSVITPGTNTSNQVAVLYQNVNCTEVPVAIHADQLTPTWRVYSTGSNVFQTRAGCL
IGAEHVNNSYECDIPIGAGICASYQTQTNSPSRAGSVASQSIIAYTMSLGAENSVAYSNNSIAIP
TNFTISVTTEILPVSMTKTSVDCTMYICGDSTECSNLLLQYGSFCTQLNRALTGIAVEQDKNTQE
VFAQVKQIYKTPPIKDFGGFNFSQILPDPSKPSKRSFIEDLLFNKVTLADAGFIKQYGDCLGDIA
ARDLICAQKFNGLTVLPPLLTDEMIAQYTSALLACTITSGWTCGAGAALQIPFAMQMAYRFNGIG
VTQNVLYENQKLIANQFNSAIGKIQDSLSSTASALGKLQDVVNQNAQALNTLVKQLSSNFGAISS
VLNDILSRLDKVEAEVQIDRLITGRLQSLQTYVTQQLIRAAEIRASANLAATKMSECVLGQSKRV
DFCGKGYHLMSFPQSAPHGVVFLHVTYVPAQEKNFTTAPAICHDGKAHFPREGVFVSNGTHWFVT
QRNFYEPQIITTDNTFVSGNCDVVIGIVNNTVYDPLQPELDSFKEELDKYFKNHTSPDVDLGDIS
GINASVVNIQKEIDRLNEVAKNLNESLIDLQELGKYEQGSGYIPEAPRDGQAYVRKDGEWVLLST
FLGRSLEVLFQGPGSLPETGGGSDYKDDDDKGGGGSGGGGSGGGGSGGGGSGGGGSHHHHHH
SEQ ID NO 66: SEQ ID NO 2 + D614N + N532P + S884C + A893C
MFVFLVLLPLVSSQCVNLTTRTQLPPAYTNSFTRGVYYPDKVFRSSVLHSTQDLFLPFFSNVTWF
HAIHVSGTNGTKRFDNPVLPFNDGVYFASTEKSNIIRGWIFGTTLDSKTQSLLIVNNATNVVIKV
CEFQFCNDPFLGVYYHKNNKSWMESEFRVYSSANNCTFEYVSQPFLMDLEGKQGNFKNLREFVFK
NIDGYFKIYSKHTPINLVRDLPQGFSALEPLVDLPIGINITRFQTLLALHRSYLTPGDSSSGWTA
GAAAYYVGYLQPRTFLLKYNENGTITDAVDCALDPLSETKCTLKSFTVEKGIYQTSNFRVQPTES
IVRFPNITNLCPFGEVFNATRFASVYAWNRKRISNCVADYSVLYNSASFSTFKCYGVSPTKLNDL
CFTNVYADSFVIRGDEVRQIAPGQTGKIADYNYKLPDDFTGCVIAWNSNNLDSKVGGNYNYLYRL
FRKSNLKPFERDISTEIYQAGSTPCNGVEGFNCYFPLQSYGFQPTNGVGYQPYRVVVLSFELLHA
PATVCGPKKSTPLVKNKCVNFNFNGLTGTGVLTESNKKFLPFQQFGRDIADTTDAVRDPQTLEIL
DITPCSFGGVSVITPGTNTSNQVAVLYQNVNCTEVPVAIHADQLTPTWRVYSTGSNVFQTRAGCL
IGAEHVNNSYECDIPIGAGICASYQTQTNSPSRAGSVASQSIIAYTMSLGAENSVAYSNNSIAIP
TNFTISVTTEILPVSMTKTSVDCTMYICGDSTECSNLLLQYGSFCTQLNRALTGIAVEQDKNTQE
VFAQVKQIYKTPPIKDFGGFNFSQILPDPSKPSKRSFIEDLLFNKVTLADAGFIKQYGDCLGDIA
ARDLICAQKFNGLTVLPPLLTDEMIAQYTSALLAGTITCGWTFGAGACLQIPFAMQMAYRFNGIG
VTQNVLYENQKLIANQFNSAIGKIQDSLSSTASALGKLQDVVNQNAQALNTLVKQLSSNFGAISS
VLNDILSRLDKVEAEVQIDRLITGRLQSLQTYVTQQLIRAAEIRASANLAATKMSECVLGQSKRV
DFCGKGYHLMSFPQSAPHGVVFLHVTYVPAQEKNFTTAPAICHDGKAHFPREGVFVSNGTHWFVT
QRNFYEPQIITTDNTFVSGNCDVVIGIVNNTVYDPLQPELDSFKEELDKYFKNHTSPDVDLGDIS
GINASVVNIQKEIDRLNEVAKNLNESLIDLQELGKYEQGSGYIPEAPRDGQAYVRKDGEWVLLST
FLGRSLEVLFQGPGSLPETGGGSDYKDDDDKGGGGGGGGSGGGGGGGGSGGGGSHHHHHH
SEQ ID NO 67: SEQ ID NO 2 + T572I +
N532P + G880C + F888C
MFVFLVLLPLVSSQCVNLTTRTQLPPAYTNSFTRGVYYPDKVFRSSVLHSTQDLFLPFFSNVTWF
HAIHVSGTNGTKRFDNPVLPFNDGVYFASTEKSNIIRGWIFGTTLDSKTQSLLIVNNATNVVIKV
CEFQFCNDPFLGVYYHKNNKSWMESEFRVYSSANNCTFEYVSQPFLMDLEGKQGNFKNLREFVFK
NIDGYFKIYSKHTPINLVRDLPQGFSALEPLVDLPIGINITRFQTLLALHRSYLTPGDSSSGWTA
GAAAYYVGYLQPRTFLLKYNENGTITDAVDCALDPLSETKCTLKSFTVEKGIYQTSNFRVQPTES
IVRFPNITNLCPFGEVFNATRFASVYAWNRKRISNCVADYSVLYNSASFSTFKCYGVSPTKLNDL
CFTNVYADSFVIRGDEVRQIAPGQTGKIADYNYKLPDDFTGCVIAWNSNNLDSKVGGNYNYLYRL
FRKSNLKPFERDISTEIYQAGSTPCNGVEGFNCYFPLQSYGFQPTNGVGYQPYRVVVLSFELLHA
PATVCGPKKSTPLVKNKCVNFNFNGLTGTGVLTESNKKFLPFQQFGRDIADITDAVRDPQTLEIL
DITPCSFGGVSVITPGTNTSNQVAVLYQDVNCTEVPVAIHADQLTPTWRVYSTGSNVFQTRAGCL
IGAEHVNNSYECDIPIGAGICASYQTQTNSPSRAGSVASQSIIAYTMSLGAENSVAYSNNSIAIP
TNFTISVTTEILPVSMTKTSVDCTMYICGDSTECSNLLLQYGSFCTQLNRALTGIAVEQDKNTQE
VFAQVKQIYKTPPIKDFGGFNFSQILPDPSKPSKRSFIEDLLFNKVTLADAGFIKQYGDCLGDIA
ARDLICAQKFNGLTVLPPLLTDEMIAQYTSALLACTITSGWTCGAGAALQIPFAMQMAYRFNGIG
VTQNVLYENQKLIANQFNSAIGKIQDSLSSTASALGKLQDVVNQNAQALNTLVKQLSSNFGAISS
VLNDILSRLDKVEAEVQIDRLITGRLQSLQTYVTQQLIRAAEIRASANLAATKMSECVLGQSKRV
DFCGKGYHLMSFPQSAPHGVVFLHVTYVPAQEKNFTTAPAICHDGKAHFPREGVFVSNGTHWFVT
QRNFYEPQIITTDNTFVSGNCDVVIGIVNNTVYDPLQPELDSFKEELDKYFKNHTSPDVDLGDIS
GINASVVNIQKEIDRLNEVAKNLNESLIDLQELGKYEQGSGYIPEAPRDGQAYVRKDGEWVLLST
FLGRSLEVLFQGPGSLPETGGGSDYKDDDDKGGGGSGGGGSGGGGGGGGSGGGGSHHHHHH
SEQ ID NO 68: SEQ ID NO 2 + T572I +
N532P + S884C + A893C
MFVFLVLLPLVSSQCVNLTTRTQLPPAYTNSFTRGVYYPDKVFRSSVLHSTQDLFLPFFSNVTWF
HAIHVSGTNGTKRFDNPVLPFNDGVYFASTEKSNIIRGWIFGTTLDSKTQSLLIVNNATNVVIKV
CEFQFCNDPFLGVYYHKNNKSWMESEFRVYSSANNCTFEYVSQPFLMDLEGKQGNFKNLREFVFK
NIDGYFKIYSKHTPINLVRDLPQGFSALEPLVDLPIGINITRFQTLLALHRSYLTPGDSSSGWTA
GAAAYYVGYLQPRTFLLKYNENGTITDAVDCALDPLSETKCTLKSFTVEKGIYQTSNFRVQPTES
IVRFPNITNLCPFGEVFNATRFASVYAWNRKRISNCVADYSVLYNSASFSTFKCYGVSPTKLNDL
CFTNVYADSFVIRGDEVRQIAPGQTGKIADYNYKLPDDFTGCVIAWNSNNLDSKVGGNYNYLYRL
FRKSNLKPFERDISTEIYQAGSTPCNGVEGFNCYFPLQSYGFQPTNGVGYQPYRVVVLSFELLHA
PATVCGPKKSTPLVKNKCVNFNFNGLTGTGVLTESNKKFLPFQQFGRDIADITDAVRDPQTLEIL
DITPCSFGGVSVITPGTNTSNQVAVLYQDVNCTEVPVAIHADQLTPTWRVYSTGSNVFQTRAGCL
IGAEHVNNSYECDIPIGAGICASYQTQTNSPSRAGSVASQSIIAYTMSLGAENSVAYSNNSIAIP
TNFTISVTTEILPVSMTKTSVDCTMYICGDSTECSNLLLQYGSFCTQLNRALTGIAVEQDKNTQE
VFAQVKQIYKTPPIKDFGGFNFSQILPDPSKPSKRSFIEDLLFNKVTLADAGFIKQYGDCLGDIA
ARDLICAQKFNGLTVLPPLLTDEMIAQYTSALLAGTITCGWTFGAGACLQIPFAMQMAYRFNGIG
VTQNVLYENQKLIANQFNSAIGKIQDSLSSTASALGKLQDVVNQNAQALNTLVKQLSSNFGAISS
VLNDILSRLDKVEAEVQIDRLITGRLQSLQTYVTQQLIRAAEIRASANLAATKMSECVLGQSKRV
DFCGKGYHLMSFPQSAPHGVVFLHVTYVPAQEKNFTTAPAICHDGKAHFPREGVFVSNGTHWFVT
QRNFYEPQIITTDNTFVSGNCDVVIGIVNNTVYDPLQPELDSFKEELDKYFKNHTSPDVDLGDIS
GINASVVNIQKEIDRLNEVAKNLNESLIDLQELGKYEQGSGYIPEAPRDGQAYVRKDGEWVLLST
FLGRSLEVLFQGPGSLPETGGGSDYKDDDDKGGGGSGGGGSGGGGSGGGGSGGGGSHHHHHH
SEQ ID NO 69: SEQ ID NO 2 + A942P + A892P + D614N + T572I
MFVFLVLLPLVSSQCVNLTTRTQLPPAYTNSFTRGVYYPDKVFRSSVLHSTQDLFLPFFSNVTWF
HAIHVSGTNGTKRFDNPVLPFNDGVYFASTEKSNIIRGWIFGTTLDSKTQSLLIVNNATNVVIKV
CEFQFCNDPFLGVYYHKNNKSWMESEFRVYSSANNCTFEYVSQPFLMDLEGKQGNFKNLREFVFK
NIDGYFKIYSKHTPINLVRDLPQGFSALEPLVDLPIGINITRFQTLLALHRSYLTPGDSSSGWTA
GAAAYYVGYLQPRTFLLKYNENGTITDAVDCALDPLSETKCTLKSFTVEKGIYQTSNFRVQPTES
IVRFPNITNLCPFGEVFNATRFASVYAWNRKRISNCVADYSVLYNSASFSTFKCYGVSPTKLNDL
CFTNVYADSFVIRGDEVRQIAPGQTGKIADYNYKLPDDFTGCVIAWNSNNLDSKVGGNYNYLYRL
FRKSNLKPFERDISTEIYQAGSTPCNGVEGFNCYFPLQSYGFQPTNGVGYQPYRVVVLSFELLHA
PATVCGPKKSTNLVKNKCVNFNFNGLTGTGVLTESNKKFLPFQQFGRDIADITDAVRDPQTLEIL
DITPCSFGGVSVITPGTNTSNQVAVLYQNVNCTEVPVAIHADQLTPTWRVYSTGSNVFQTRAGCL
IGAEHVNNSYECDIPIGAGICASYQTQTNSPSRAGSVASQSIIAYTMSLGAENSVAYSNNSIAIP
TNFTISVTTEILPVSMTKTSVDCTMYICGDSTECSNLLLQYGSFCTQLNRALTGIAVEQDKNTQE
VFAQVKQIYKTPPIKDFGGFNFSQILPDPSKPSKRSFIEDLLFNKVTLADAGFIKQYGDCLGDIA
ARDLICAQKFNGLTVLPPLLTDEMIAQYTSALLAGTITSGWTFGAGPALQIPFAMQMAYRFNGIG
VTQNVLYENQKLIANQFNSAIGKIQDSLSSTPSALGKLQDVVNQNAQALNTLVKQLSSNFGAISS
VLNDILSRLDKVEAEVQIDRLITGRLQSLQTYVTQQLIRAAEIRASANLAATKMSECVLGQSKRV
DFCGKGYHLMSFPQSAPHGVVFLHVTYVPAQEKNFTTAPAICHDGKAHFPREGVFVSNGTHWFVT
QRNFYEPQIITTDNTFVSGNCDVVIGIVNNTVYDPLQPELDSFKEELDKYFKNHTSPDVDLGDIS
GINASVVNIQKEIDRLNEVAKNLNESLIDLQELGKYEQGSGYIPEAPRDGQAYVRKDGEWVLLST
FLGRSLEVLFQGPGSLPETGGGSDYKDDDDKGGGGSGGGGSGGGGSGGGGSGGGGSHHHHHH
SEQ ID NO 70: SEQ ID NO 2 + A942P + A892P + D614N + N532P
MFVFLVLLPLVSSQCVNLTTRTQLPPAYTNSFTRGVYYPDKVFRSSVLHSTQDLFLPFFSNVTWF
HAIHVSGTNGTKRFDNPVLPFNDGVYFASTEKSNIIRGWIFGTTLDSKTQSLLIVNNATNVVIKV
CEFQFCNDPFLGVYYHKNNKSWMESEFRVYSSANNCTFEYVSQPFLMDLEGKQGNFKNLREFVFK
NIDGYFKIYSKHTPINLVRDLPQGFSALEPLVDLPIGINITRFQTLLALHRSYLTPGDSSSGWTA
GAAAYYVGYLQPRTFLLKYNENGTITDAVDCALDPLSETKCTLKSFTVEKGIYQTSNFRVQPTES
IVRFPNITNLCPFGEVFNATRFASVYAWNRKRISNCVADYSVLYNSASFSTFKCYGVSPTKLNDL
CFTNVYADSFVIRGDEVRQIAPGQTGKIADYNYKLPDDFTGCVIAWNSNNLDSKVGGNYNYLYRL
FRKSNLKPFERDISTEIYQAGSTPCNGVEGFNCYFPLQSYGFQPTNGVGYQPYRVVVLSFELLHA
PATVCGPKKSTPLVKNKCVNFNFNGLTGTGVLTESNKKFLPFQQFGRDIADTTDAVRDPQTLEIL
DITPCSFGGVSVITPGTNTSNQVAVLYQNVNCTEVPVAIHADQLTPTWRVYSTGSNVFQTRAGCL
IGAEHVNNSYECDIPIGAGICASYQTQTNSPSRAGSVASQSIIAYTMSLGAENSVAYSNNSIAIP
TNFTISVTTEILPVSMTKTSVDCTMYICGDSTECSNLLLQYGSFCTQLNRALTGIAVEQDKNTQE
VFAQVKQIYKTPPIKDFGGFNFSQILPDPSKPSKRSFIEDLLFNKVTLADAGFIKQYGDCLGDIA
ARDLICAQKFNGLTVLPPLLTDEMIAQYTSALLAGTITSGWTFGAGPALQIPFAMQMAYRFNGIG
VTQNVLYENQKLIANQFNSAIGKIQDSLSSTPSALGKLQDVVNQNAQALNTLVKQLSSNFGAISS
VLNDILSRLDKVEAEVQIDRLITGRLQSLQTYVTQQLIRAAEIRASANLAATKMSECVLGQSKRV
DFCGKGYHLMSFPQSAPHGVVFLHVTYVPAQEKNFTTAPAICHDGKAHFPREGVFVSNGTHWFVT
QRNFYEPQIITTDNTFVSGNCDVVIGIVNNTVYDPLQPELDSFKEELDKYFKNHTSPDVDLGDIS
GINASVVNIQKEIDRLNEVAKNLNESLIDLQELGKYEQGSGYIPEAPRDGQAYVRKDGEWVLLST
FLGRSLEVLFQGPGSLPETGGGSDYKDDDDKGGGGSGGGGSGGGGSGGGGSGGGGSHHHHHH
SEQ ID NO 71: SEQ ID NO 2 + A942P + A892P + D614N + G880C + F888C
MFVFLVLLPLVSSQCVNLTTRTQLPPAYTNSFTRGVYYPDKVFRSSVLHSTQDLFLPFFSNVTWF
HAIHVSGTNGTKRFDNPVLPFNDGVYFASTEKSNIIRGWIFGTTLDSKTQSLLIVNNATNVVIKV
CEFQFCNDPFLGVYYHKNNKSWMESEFRVYSSANNCTFEYVSQPFLMDLEGKQGNFKNLREFVFK
NIDGYFKIYSKHTPINLVRDLPQGFSALEPLVDLPIGINITRFQTLLALHRSYLTPGDSSSGWTA
GAAAYYVGYLQPRTFLLKYNENGTITDAVDCALDPLSETKCTLKSFTVEKGIYQTSNFRVQPTES
IVRFPNITNLCPFGEVFNATRFASVYAWNRKRISNCVADYSVLYNSASFSTFKCYGVSPTKLNDL
CFTNVYADSFVIRGDEVRQIAPGQTGKIADYNYKLPDDFTGCVIAWNSNNLDSKVGGNYNYLYRL
FRKSNLKPFERDISTEIYQAGSTPCNGVEGFNCYFPLQSYGFQPTNGVGYQPYRVVVLSFELLHA
PATVCGPKKSTNLVKNKCVNFNFNGLTGTGVLTESNKKFLPFQQFGRDIADTTDAVRDPQTLEIL
DITPCSFGGVSVITPGTNTSNQVAVLYQNVNCTEVPVAIHADQLTPTWRVYSTGSNVFQTRAGCL
IGAEHVNNSYECDIPIGAGICASYQTQTNSPSRAGSVASQSIIAYTMSLGAENSVAYSNNSIAIP
TNFTISVTTEILPVSMTKTSVDCTMYICGDSTECSNLLLQYGSFCTQLNRALTGIAVEQDKNTQE
VFAQVKQIYKTPPIKDFGGFNFSQILPDPSKPSKRSFIEDLLFNKVTLADAGFIKQYGDCLGDIA
ARDLICAQKFNGLTVLPPLLTDEMIAQYTSALLACTITSGWTCGAGPALQIPFAMQMAYRFNGIG
VTQNVLYENQKLIANQFNSAIGKIQDSLSSTPSALGKLQDVVNQNAQALNTLVKQLSSNFGAISS
VLNDILSRLDKVEAEVQIDRLITGRLQSLQTYVTQQLIRAAEIRASANLAATKMSECVLGQSKRV
DFCGKGYHLMSFPQSAPHGVVFLHVTYVPAQEKNFTTAPAICHDGKAHFPREGVFVSNGTHWFVT
QRNFYEPQIITTDNTFVSGNCDVVIGIVNNTVYDPLQPELDSFKEELDKYFKNHTSPDVDLGDIS
GINASVVNIQKEIDRLNEVAKNLNESLIDLQELGKYEQGSGYIPEAPRDGQAYVRKDGEWVLLST
FLGRSLEVLFQGPGSLPETGGGSDYKDDDDKGGGGSGGGGGGGGSGGGGSGGGGSHHHHHH
SEQ ID NO 72: SEQ ID NO 2 + A942P + A892P + D614N + S884C + A893C
MFVFLVLLPLVSSQCVNLTTRTQLPPAYTNSFTRGVYYPDKVFRSSVLHSTQDLFLPFFSNVTWF
HAIHVSGTNGTKRFDNPVLPFNDGVYFASTEKSNIIRGWIFGTTLDSKTQSLLIVNNATNVVIKV
CEFQFCNDPFLGVYYHKNNKSWMESEFRVYSSANNCTFEYVSQPFLMDLEGKQGNFKNLREFVFK
NIDGYFKIYSKHTPINLVRDLPQGFSALEPLVDLPIGINITRFQTLLALHRSYLTPGDSSSGWTA
GAAAYYVGYLQPRTFLLKYNENGTITDAVDCALDPLSETKCTLKSFTVEKGIYQTSNFRVQPTES
IVRFPNITNLCPFGEVFNATRFASVYAWNRKRISNCVADYSVLYNSASFSTFKCYGVSPTKLNDL
CFTNVYADSFVIRGDEVRQIAPGQTGKIADYNYKLPDDFTGCVIAWNSNNLDSKVGGNYNYLYRL
FRKSNLKPFERDISTEIYQAGSTPCNGVEGFNCYFPLQSYGFQPTNGVGYQPYRVVVLSFELLHA
PATVCGPKKSTNLVKNKCVNFNFNGLTGTGVLTESNKKFLPFQQFGRDIADTTDAVRDPQTLEIL
DITPCSFGGVSVITPGTNTSNQVAVLYQNVNCTEVPVAIHADQLTPTWRVYSTGSNVFQTRAGCL
IGAEHVNNSYECDIPIGAGICASYQTQTNSPSRAGSVASQSIIAYTMSLGAENSVAYSNNSIAIP
TNFTISVTTEILPVSMTKTSVDCTMYICGDSTECSNLLLQYGSFCTQLNRALTGIAVEQDKNTQE
VFAQVKQIYKTPPIKDFGGFNFSQILPDPSKPSKRSFIEDLLFNKVTLADAGFIKQYGDCLGDIA
ARDLICAQKFNGLTVLPPLLTDEMIAQYTSALLAGTITCGWTFGAGPCLQIPFAMQMAYRFNGIG
VTQNVLYENQKLIANQFNSAIGKIQDSLSSTPSALGKLQDVVNQNAQALNTLVKQLSSNFGAISS
VLNDILSRLDKVEAEVQIDRLITGRLQSLQTYVTQQLIRAAEIRASANLAATKMSECVLGQSKRV
DFCGKGYHLMSFPQSAPHGVVFLHVTYVPAQEKNFTTAPAICHDGKAHFPREGVFVSNGTHWFVT
QRNFYEPQIITTDNTFVSGNCDVVIGIVNNTVYDPLQPELDSFKEELDKYFKNHTSPDVDLGDIS
GINASVVNIQKEIDRLNEVAKNLNESLIDLQELGKYEQGSGYIPEAPRDGQAYVRKDGEWVLLST
FLGRSLEVLFQGPGSLPETGGGSDYKDDDDKGGGGSGGGGSGGGGSGGGGSGGGGSHHHHHH
SEQ ID NO 73: SEQ ID NO 2 + A942P + A892P + T572I +
N532P
MFVFLVLLPLVSSQCVNLTTRTQLPPAYTNSFTRGVYYPDKVFRSSVLHSTQDLFLPFFSNVTWF
HAIHVSGTNGTKRFDNPVLPFNDGVYFASTEKSNIIRGWIFGTTLDSKTQSLLIVNNATNVVIKV
CEFQFCNDPFLGVYYHKNNKSWMESEFRVYSSANNCTFEYVSQPFLMDLEGKQGNFKNLREFVFK
NIDGYFKIYSKHTPINLVRDLPQGFSALEPLVDLPIGINITRFQTLLALHRSYLTPGDSSSGWTA
GAAAYYVGYLQPRTFLLKYNENGTITDAVDCALDPLSETKCTLKSFTVEKGIYQTSNFRVQPTES
IVRFPNITNLCPFGEVFNATRFASVYAWNRKRISNCVADYSVLYNSASFSTFKCYGVSPTKLNDL
CFTNVYADSFVIRGDEVRQIAPGQTGKIADYNYKLPDDFTGCVIAWNSNNLDSKVGGNYNYLYRL
FRKSNLKPFERDISTEIYQAGSTPCNGVEGFNCYFPLQSYGFQPTNGVGYQPYRVVVLSFELLHA
PATVCGPKKSTPLVKNKCVNFNFNGLTGTGVLTESNKKFLPFQQFGRDIADITDAVRDPQTLEIL
DITPCSFGGVSVITPGTNTSNQVAVLYQDVNCTEVPVAIHADQLTPTWRVYSTGSNVFQTRAGCL
IGAEHVNNSYECDIPIGAGICASYQTQTNSPSRAGSVASQSIIAYTMSLGAENSVAYSNNSIAIP
TNFTISVTTEILPVSMTKTSVDCTMYICGDSTECSNLLLQYGSFCTQLNRALTGIAVEQDKNTQE
VFAQVKQIYKTPPIKDFGGFNFSQILPDPSKPSKRSFIEDLLFNKVTLADAGFIKQYGDCLGDIA
ARDLICAQKFNGLTVLPPLLTDEMIAQYTSALLAGTITSGWTFGAGPALQIPFAMQMAYRFNGIG
VTQNVLYENQKLIANQFNSAIGKIQDSLSSTPSALGKLQDVVNQNAQALNTLVKQLSSNFGAISS
VLNDILSRLDKVEAEVQIDRLITGRLQSLQTYVTQQLIRAAEIRASANLAATKMSECVLGQSKRV
DFCGKGYHLMSFPQSAPHGVVFLHVTYVPAQEKNFTTAPAICHDGKAHFPREGVFVSNGTHWFVT
QRNFYEPQIITTDNTFVSGNCDVVIGIVNNTVYDPLQPELDSFKEELDKYFKNHTSPDVDLGDIS
GINASVVNIQKEIDRLNEVAKNLNESLIDLQELGKYEQGSGYIPEAPRDGQAYVRKDGEWVLLST
FLGRSLEVLFQGPGSLPETGGGSDYKDDDDKGGGGSGGGGSGGGGGGGGSGGGGSHHHHHH
SEQ ID NO 74: SEQ ID NO 2 + A942P + A892P + T572I +
G880C + F888C
MFVFLVLLPLVSSQCVNLTTRTQLPPAYTNSFTRGVYYPDKVFRSSVLHSTQDLFLPFFSNVTWF
HAIHVSGTNGTKRFDNPVLPFNDGVYFASTEKSNIIRGWIFGTTLDSKTQSLLIVNNATNVVIKV
CEFQFCNDPFLGVYYHKNNKSWMESEFRVYSSANNCTFEYVSQPFLMDLEGKQGNFKNLREFVFK
NIDGYFKIYSKHTPINLVRDLPQGFSALEPLVDLPIGINITRFQTLLALHRSYLTPGDSSSGWTA
GAAAYYVGYLQPRTFLLKYNENGTITDAVDCALDPLSETKCTLKSFTVEKGIYQTSNFRVQPTES
IVRFPNITNLCPFGEVFNATRFASVYAWNRKRISNCVADYSVLYNSASFSTFKCYGVSPTKLNDL
CFTNVYADSFVIRGDEVRQIAPGQTGKIADYNYKLPDDFTGCVIAWNSNNLDSKVGGNYNYLYRL
FRKSNLKPFERDISTEIYQAGSTPCNGVEGFNCYFPLQSYGFQPTNGVGYQPYRVVVLSFELLHA
PATVCGPKKSTNLVKNKCVNFNFNGLTGTGVLTESNKKFLPFQQFGRDIADITDAVRDPQTLEIL
DITPCSFGGVSVITPGTNTSNQVAVLYQDVNCTEVPVAIHADQLTPTWRVYSTGSNVFQTRAGCL
IGAEHVNNSYECDIPIGAGICASYQTQTNSPSRAGSVASQSIIAYTMSLGAENSVAYSNNSIAIP
TNFTISVTTEILPVSMTKTSVDCTMYICGDSTECSNLLLQYGSFCTQLNRALTGIAVEQDKNTQE
VFAQVKQIYKTPPIKDFGGFNFSQILPDPSKPSKRSFIEDLLFNKVTLADAGFIKQYGDCLGDIA
ARDLICAQKFNGLTVLPPLLTDEMIAQYTSALLACTITSGWTCGAGPALQIPFAMQMAYRFNGIG
VTQNVLYENQKLIANQFNSAIGKIQDSLSSTPSALGKLQDVVNQNAQALNTLVKQLSSNFGAISS
VLNDILSRLDKVEAEVQIDRLITGRLQSLQTYVTQQLIRAAEIRASANLAATKMSECVLGQSKRV
DFCGKGYHLMSFPQSAPHGVVFLHVTYVPAQEKNFTTAPAICHDGKAHFPREGVFVSNGTHWFVT
QRNFYEPQIITTDNTFVSGNCDVVIGIVNNTVYDPLQPELDSFKEELDKYFKNHTSPDVDLGDIS
GINASVVNIQKEIDRLNEVAKNLNESLIDLQELGKYEQGSGYIPEAPRDGQAYVRKDGEWVLLST
FLGRSLEVLFQGPGSLPETGGGSDYKDDDDKGGGGSGGGGSGGGGSGGGGSGGGGSHHHHHH
SEQ ID NO 75: SEQ ID NO 2 + A942P + A892P + T572I +
S884C + A893C
MFVFLVLLPLVSSQCVNLTTRTQLPPAYTNSFTRGVYYPDKVFRSSVLHSTQDLFLPFFSNVTWF
HAIHVSGTNGTKRFDNPVLPFNDGVYFASTEKSNIIRGWIFGTTLDSKTQSLLIVNNATNVVIKV
CEFQFCNDPFLGVYYHKNNKSWMESEFRVYSSANNCTFEYVSQPFLMDLEGKQGNFKNLREFVFK
NIDGYFKIYSKHTPINLVRDLPQGFSALEPLVDLPIGINITRFQTLLALHRSYLTPGDSSSGWTA
GAAAYYVGYLQPRTFLLKYNENGTITDAVDCALDPLSETKCTLKSFTVEKGIYQTSNFRVQPTES
IVRFPNITNLCPFGEVFNATRFASVYAWNRKRISNCVADYSVLYNSASFSTFKCYGVSPTKLNDL
CFTNVYADSFVIRGDEVRQIAPGQTGKIADYNYKLPDDFTGCVIAWNSNNLDSKVGGNYNYLYRL
FRKSNLKPFERDISTEIYQAGSTPCNGVEGFNCYFPLQSYGFQPTNGVGYQPYRVVVLSFELLHA
PATVCGPKKSTNLVKNKCVNFNFNGLTGTGVLTESNKKFLPFQQFGRDIADITDAVRDPQTLEIL
DITPCSFGGVSVITPGTNTSNQVAVLYQDVNCTEVPVAIHADQLTPTWRVYSTGSNVFQTRAGCL
IGAEHVNNSYECDIPIGAGICASYQTQTNSPSRAGSVASQSIIAYTMSLGAENSVAYSNNSIAIP
TNFTISVTTEILPVSMTKTSVDCTMYICGDSTECSNLLLQYGSFCTQLNRALTGIAVEQDKNTQE
VFAQVKQIYKTPPIKDFGGFNFSQILPDPSKPSKRSFIEDLLFNKVTLADAGFIKQYGDCLGDIA
ARDLICAQKFNGLTVLPPLLTDEMIAQYTSALLAGTITCGWTFGAGPCLQIPFAMQMAYRFNGIG
VTQNVLYENQKLIANQFNSAIGKIQDSLSSTPSALGKLQDVVNQNAQALNTLVKQLSSNFGAISS
VLNDILSRLDKVEAEVQIDRLITGRLQSLQTYVTQQLIRAAEIRASANLAATKMSECVLGQSKRV
DFCGKGYHLMSFPQSAPHGVVFLHVTYVPAQEKNFTTAPAICHDGKAHFPREGVFVSNGTHWFVT
QRNFYEPQIITTDNTFVSGNCDVVIGIVNNTVYDPLQPELDSFKEELDKYFKNHTSPDVDLGDIS
GINASVVNIQKEIDRLNEVAKNLNESLIDLQELGKYEQGSGYIPEAPRDGQAYVRKDGEWVLLST
FLGRSLEVLFQGPGSLPETGGGSDYKDDDDKGGGGSGGGGSGGGGSGGGGSGGGGSHHHHHH
SEQ ID NO 76: SEQ ID NO 2 + A942P + A892P + N532P + G880C + F888C
MFVFLVLLPLVSSQCVNLTTRTQLPPAYTNSFTRGVYYPDKVFRSSVLHSTQDLFLPFFSNVTWF
HAIHVSGTNGTKRFDNPVLPFNDGVYFASTEKSNIIRGWIFGTTLDSKTQSLLIVNNATNVVIKV
CEFQFCNDPFLGVYYHKNNKSWMESEFRVYSSANNCTFEYVSQPFLMDLEGKQGNFKNLREFVFK
NIDGYFKIYSKHTPINLVRDLPQGFSALEPLVDLPIGINITRFQTLLALHRSYLTPGDSSSGWTA
GAAAYYVGYLQPRTFLLKYNENGTITDAVDCALDPLSETKCTLKSFTVEKGIYQTSNFRVQPTES
IVRFPNITNLCPFGEVFNATRFASVYAWNRKRISNCVADYSVLYNSASFSTFKCYGVSPTKLNDL
CFTNVYADSFVIRGDEVRQIAPGQTGKIADYNYKLPDDFTGCVIAWNSNNLDSKVGGNYNYLYRL
FRKSNLKPFERDISTEIYQAGSTPCNGVEGFNCYFPLQSYGFQPTNGVGYQPYRVVVLSFELLHA
PATVCGPKKSTPLVKNKCVNFNFNGLTGTGVLTESNKKFLPFQQFGRDIADTTDAVRDPQTLEIL
DITPCSFGGVSVITPGTNTSNQVAVLYQDVNCTEVPVAIHADQLTPTWRVYSTGSNVFQTRAGCL
IGAEHVNNSYECDIPIGAGICASYQTQTNSPSRAGSVASQSIIAYTMSLGAENSVAYSNNSIAIP
TNFTISVTTEILPVSMTKTSVDCTMYICGDSTECSNLLLQYGSFCTQLNRALTGIAVEQDKNTQE
VFAQVKQIYKTPPIKDFGGFNFSQILPDPSKPSKRSFIEDLLFNKVTLADAGFIKQYGDCLGDIA
ARDLICAQKFNGLTVLPPLLTDEMIAQYTSALLACTITSGWTCGAGPALQIPFAMQMAYRFNGIG
VTQNVLYENQKLIANQFNSAIGKIQDSLSSTPSALGKLQDVVNQNAQALNTLVKQLSSNFGAISS
VLNDILSRLDKVEAEVQIDRLITGRLQSLQTYVTQQLIRAAEIRASANLAATKMSECVLGQSKRV
DFCGKGYHLMSFPQSAPHGVVFLHVTYVPAQEKNFTTAPAICHDGKAHFPREGVFVSNGTHWFVT
QRNFYEPQIITTDNTFVSGNCDVVIGIVNNTVYDPLQPELDSFKEELDKYFKNHTSPDVDLGDIS
GINASVVNIQKEIDRLNEVAKNLNESLIDLQELGKYEQGSGYIPEAPRDGQAYVRKDGEWVLLST
FLGRSLEVLFQGPGSLPETGGGSDYKDDDDKGGGGSGGGGSGGGGSGGGGSGGGGSHHHHHH
SEQ ID NO 77: SEQ ID NO 2 + A942P + A892P + N532P + S884C + A893C
MFVFLVLLPLVSSQCVNLTTRTQLPPAYTNSFTRGVYYPDKVFRSSVLHSTQDLFLPFFSNVTWF
HAIHVSGTNGTKRFDNPVLPFNDGVYFASTEKSNIIRGWIFGTTLDSKTQSLLIVNNATNVVIKV
CEFQFCNDPFLGVYYHKNNKSWMESEFRVYSSANNCTFEYVSQPFLMDLEGKQGNFKNLREFVFK
NIDGYFKIYSKHTPINLVRDLPQGFSALEPLVDLPIGINITRFQTLLALHRSYLTPGDSSSGWTA
GAAAYYVGYLQPRTFLLKYNENGTITDAVDCALDPLSETKCTLKSFTVEKGIYQTSNFRVQPTES
IVRFPNITNLCPFGEVFNATRFASVYAWNRKRISNCVADYSVLYNSASFSTFKCYGVSPTKLNDL
CFTNVYADSFVIRGDEVRQIAPGQTGKIADYNYKLPDDFTGCVIAWNSNNLDSKVGGNYNYLYRL
FRKSNLKPFERDISTEIYQAGSTPCNGVEGFNCYFPLQSYGFQPTNGVGYQPYRVVVLSFELLHA
PATVCGPKKSTPLVKNKCVNFNFNGLTGTGVLTESNKKFLPFQQFGRDIADTTDAVRDPQTLEIL
DITPCSFGGVSVITPGTNTSNQVAVLYQDVNCTEVPVAIHADQLTPTWRVYSTGSNVFQTRAGCL
IGAEHVNNSYECDIPIGAGICASYQTQTNSPSRAGSVASQSIIAYTMSLGAENSVAYSNNSIAIP
TNFTISVTTEILPVSMTKTSVDCTMYICGDSTECSNLLLQYGSFCTQLNRALTGIAVEQDKNTQE
VFAQVKQIYKTPPIKDFGGFNFSQILPDPSKPSKRSFIEDLLFNKVTLADAGFIKQYGDCLGDIA
ARDLICAQKFNGLTVLPPLLTDEMIAQYTSALLAGTITCGWTFGAGPCLQIPFAMQMAYRFNGIG
VTQNVLYENQKLIANQFNSAIGKIQDSLSSTPSALGKLQDVVNQNAQALNTLVKQLSSNFGAISS
VLNDILSRLDKVEAEVQIDRLITGRLQSLQTYVTQQLIRAAEIRASANLAATKMSECVLGQSKRV
DFCGKGYHLMSFPQSAPHGVVFLHVTYVPAQEKNFTTAPAICHDGKAHFPREGVFVSNGTHWFVT
QRNFYEPQIITTDNTFVSGNCDVVIGIVNNTVYDPLQPELDSFKEELDKYFKNHTSPDVDLGDIS
GINASVVNIQKEIDRLNEVAKNLNESLIDLQELGKYEQGSGYIPEAPRDGQAYVRKDGEWVLLST
FLGRSLEVLFQGPGSLPETGGGSDYKDDDDKGGGGSGGGGSGGGGSGGGGSGGGGSHHHHHH
SEQ ID NO 78: SEQ ID NO 2 + A942P + D614N + T572I +
N532P
MFVFLVLLPLVSSQCVNLTTRTQLPPAYTNSFTRGVYYPDKVFRSSVLHSTQDLFLPFFSNVTWF
HAIHVSGTNGTKRFDNPVLPFNDGVYFASTEKSNIIRGWIFGTTLDSKTQSLLIVNNATNVVIKV
CEFQFCNDPFLGVYYHKNNKSWMESEFRVYSSANNCTFEYVSQPFLMDLEGKQGNFKNLREFVFK
NIDGYFKIYSKHTPINLVRDLPQGFSALEPLVDLPIGINITRFQTLLALHRSYLTPGDSSSGWTA
GAAAYYVGYLQPRTFLLKYNENGTITDAVDCALDPLSETKCTLKSFTVEKGIYQTSNFRVQPTES
IVRFPNITNLCPFGEVFNATRFASVYAWNRKRISNCVADYSVLYNSASFSTFKCYGVSPTKLNDL
CFTNVYADSFVIRGDEVRQIAPGQTGKIADYNYKLPDDFTGCVIAWNSNNLDSKVGGNYNYLYRL
FRKSNLKPFERDISTEIYQAGSTPCNGVEGFNCYFPLQSYGFQPTNGVGYQPYRVVVLSFELLHA
PATVCGPKKSTPLVKNKCVNFNFNGLTGTGVLTESNKKFLPFQQFGRDIADITDAVRDPQTLEIL
DITPCSFGGVSVITPGTNTSNQVAVLYQNVNCTEVPVAIHADQLTPTWRVYSTGSNVFQTRAGCL
IGAEHVNNSYECDIPIGAGICASYQTQTNSPSRAGSVASQSIIAYTMSLGAENSVAYSNNSIAIP
TNFTISVTTEILPVSMTKTSVDCTMYICGDSTECSNLLLQYGSFCTQLNRALTGIAVEQDKNTQE
VFAQVKQIYKTPPIKDFGGFNFSQILPDPSKPSKRSFIEDLLFNKVTLADAGFIKQYGDCLGDIA
ARDLICAQKFNGLTVLPPLLTDEMIAQYTSALLAGTITSGWTFGAGAALQIPFAMQMAYRFNGIG
VTQNVLYENQKLIANQFNSAIGKIQDSLSSTPSALGKLQDVVNQNAQALNTLVKQLSSNFGAISS
VLNDILSRLDKVEAEVQIDRLITGRLQSLQTYVTQQLIRAAEIRASANLAATKMSECVLGQSKRV
DFCGKGYHLMSFPQSAPHGVVFLHVTYVPAQEKNFTTAPAICHDGKAHFPREGVFVSNGTHWFVT
QRNFYEPQIITTDNTFVSGNCDVVIGIVNNTVYDPLQPELDSFKEELDKYFKNHTSPDVDLGDIS
GINASVVNIQKEIDRLNEVAKNLNESLIDLQELGKYEQGSGYIPEAPRDGQAYVRKDGEWVLLST
FLGRSLEVLFQGPGSLPETGGGSDYKDDDDKGGGGSGGGGSGGGGSGGGGSGGGGSHHHHHH
SEQ ID NO 79: SEQ ID NO 2 + A942P + D614N + T572I +
G880C + F888C
MFVFLVLLPLVSSQCVNLTTRTQLPPAYTNSFTRGVYYPDKVFRSSVLHSTQDLFLPFFSNVTWF
HAIHVSGTNGTKRFDNPVLPFNDGVYFASTEKSNIIRGWIFGTTLDSKTQSLLIVNNATNVVIKV
CEFQFCNDPFLGVYYHKNNKSWMESEFRVYSSANNCTFEYVSQPFLMDLEGKQGNFKNLREFVFK
NIDGYFKIYSKHTPINLVRDLPQGFSALEPLVDLPIGINITRFQTLLALHRSYLTPGDSSSGWTA
GAAAYYVGYLQPRTFLLKYNENGTITDAVDCALDPLSETKCTLKSFTVEKGIYQTSNFRVQPTES
IVRFPNITNLCPFGEVFNATRFASVYAWNRKRISNCVADYSVLYNSASFSTFKCYGVSPTKLNDL
CFTNVYADSFVIRGDEVRQIAPGQTGKIADYNYKLPDDFTGCVIAWNSNNLDSKVGGNYNYLYRL
FRKSNLKPFERDISTEIYQAGSTPCNGVEGFNCYFPLQSYGFQPTNGVGYQPYRVVVLSFELLHA
PATVCGPKKSTNLVKNKCVNFNFNGLTGTGVLTESNKKFLPFQQFGRDIADITDAVRDPQTLEIL
DITPCSFGGVSVITPGTNTSNQVAVLYQNVNCTEVPVAIHADQLTPTWRVYSTGSNVFQTRAGCL
IGAEHVNNSYECDIPIGAGICASYQTQTNSPSRAGSVASQSIIAYTMSLGAENSVAYSNNSIAIP
TNFTISVTTEILPVSMTKTSVDCTMYICGDSTECSNLLLQYGSFCTQLNRALTGIAVEQDKNTQE
VFAQVKQIYKTPPIKDFGGFNFSQILPDPSKPSKRSFIEDLLFNKVTLADAGFIKQYGDCLGDIA
ARDLICAQKFNGLTVLPPLLTDEMIAQYTSALLACTITSGWTCGAGAALQIPFAMQMAYRFNGIG
VTQNVLYENQKLIANQFNSAIGKIQDSLSSTPSALGKLQDVVNQNAQALNTLVKQLSSNFGAISS
VLNDILSRLDKVEAEVQIDRLITGRLQSLQTYVTQQLIRAAEIRASANLAATKMSECVLGQSKRV
DFCGKGYHLMSFPQSAPHGVVFLHVTYVPAQEKNFTTAPAICHDGKAHFPREGVFVSNGTHWFVT
QRNFYEPQIITTDNTFVSGNCDVVIGIVNNTVYDPLQPELDSFKEELDKYFKNHTSPDVDLGDIS
GINASVVNIQKEIDRLNEVAKNLNESLIDLQELGKYEQGSGYIPEAPRDGQAYVRKDGEWVLLST
FLGRSLEVLFQGPGSLPETGGGSDYKDDDDKGGGGSGGGGSGGGGSGGGGSGGGGSHHHHHH
SEQ ID NO 80: SEQ ID NO 2 + A942P + D614N + T572I +
S884C + A893C
MFVFLVLLPLVSSQCVNLTTRTQLPPAYTNSFTRGVYYPDKVFRSSVLHSTQDLFLPFFSNVTWF
HAIHVSGTNGTKRFDNPVLPFNDGVYFASTEKSNIIRGWIFGTTLDSKTQSLLIVNNATNVVIKV
CEFQFCNDPFLGVYYHKNNKSWMESEFRVYSSANNCTFEYVSQPFLMDLEGKQGNFKNLREFVFK
NIDGYFKIYSKHTPINLVRDLPQGFSALEPLVDLPIGINITRFQTLLALHRSYLTPGDSSSGWTA
GAAAYYVGYLQPRTFLLKYNENGTITDAVDCALDPLSETKCTLKSFTVEKGIYQTSNFRVQPTES
IVRFPNITNLCPFGEVFNATRFASVYAWNRKRISNCVADYSVLYNSASFSTFKCYGVSPTKLNDL
CFTNVYADSFVIRGDEVRQIAPGQTGKIADYNYKLPDDFTGCVIAWNSNNLDSKVGGNYNYLYRL
FRKSNLKPFERDISTEIYQAGSTPCNGVEGFNCYFPLQSYGFQPTNGVGYQPYRVVVLSFELLHA
PATVCGPKKSTNLVKNKCVNFNFNGLTGTGVLTESNKKFLPFQQFGRDIADITDAVRDPQTLEIL
DITPCSFGGVSVITPGTNTSNQVAVLYQNVNCTEVPVAIHADQLTPTWRVYSTGSNVFQTRAGCL
IGAEHVNNSYECDIPIGAGICASYQTQTNSPSRAGSVASQSIIAYTMSLGAENSVAYSNNSIAIP
TNFTISVTTEILPVSMTKTSVDCTMYICGDSTECSNLLLQYGSFCTQLNRALTGIAVEQDKNTQE
VFAQVKQIYKTPPIKDFGGFNFSQILPDPSKPSKRSFIEDLLFNKVTLADAGFIKQYGDCLGDIA
ARDLICAQKFNGLTVLPPLLTDEMIAQYTSALLAGTITCGWTFGAGACLQIPFAMQMAYRFNGIG
VTQNVLYENQKLIANQFNSAIGKIQDSLSSTPSALGKLQDVVNQNAQALNTLVKQLSSNFGAISS
VLNDILSRLDKVEAEVQIDRLITGRLQSLQTYVTQQLIRAAEIRASANLAATKMSECVLGQSKRV
DFCGKGYHLMSFPQSAPHGVVFLHVTYVPAQEKNFTTAPAICHDGKAHFPREGVFVSNGTHWFVT
QRNFYEPQIITTDNTFVSGNCDVVIGIVNNTVYDPLQPELDSFKEELDKYFKNHTSPDVDLGDIS
GINASVVNIQKEIDRLNEVAKNLNESLIDLQELGKYEQGSGYIPEAPRDGQAYVRKDGEWVLLST
FLGRSLEVLFQGPGSLPETGGGSDYKDDDDKGGGGSGGGGSGGGGSGGGGSGGGGSHHHHHH
SEQ ID NO 81: SEQ ID NO 2 + A942P + D614N + N532P + G880C + F888C
MFVFLVLLPLVSSQCVNLTTRTQLPPAYTNSFTRGVYYPDKVFRSSVLHSTQDLFLPFFSNVTWF
HAIHVSGTNGTKRFDNPVLPFNDGVYFASTEKSNIIRGWIFGTTLDSKTQSLLIVNNATNVVIKV
CEFQFCNDPFLGVYYHKNNKSWMESEFRVYSSANNCTFEYVSQPFLMDLEGKQGNFKNLREFVFK
NIDGYFKIYSKHTPINLVRDLPQGFSALEPLVDLPIGINITRFQTLLALHRSYLTPGDSSSGWTA
GAAAYYVGYLQPRTFLLKYNENGTITDAVDCALDPLSETKCTLKSFTVEKGIYQTSNFRVQPTES
IVRFPNITNLCPFGEVFNATRFASVYAWNRKRISNCVADYSVLYNSASFSTFKCYGVSPTKLNDL
CFTNVYADSFVIRGDEVRQIAPGQTGKIADYNYKLPDDFTGCVIAWNSNNLDSKVGGNYNYLYRL
FRKSNLKPFERDISTEIYQAGSTPCNGVEGFNCYFPLQSYGFQPTNGVGYQPYRVVVLSFELLHA
PATVCGPKKSTPLVKNKCVNFNFNGLTGTGVLTESNKKFLPFQQFGRDIADTTDAVRDPQTLEIL
DITPCSFGGVSVITPGTNTSNQVAVLYQNVNCTEVPVAIHADQLTPTWRVYSTGSNVFQTRAGCL
IGAEHVNNSYECDIPIGAGICASYQTQTNSPSRAGSVASQSIIAYTMSLGAENSVAYSNNSIAIP
TNFTISVTTEILPVSMTKTSVDCTMYICGDSTECSNLLLQYGSFCTQLNRALTGIAVEQDKNTQE
VFAQVKQIYKTPPIKDFGGFNFSQILPDPSKPSKRSFIEDLLFNKVTLADAGFIKQYGDCLGDIA
ARDLICAQKFNGLTVLPPLLTDEMIAQYTSALLACTITSGWTCGAGAALQIPFAMQMAYRFNGIG
VTQNVLYENQKLIANQFNSAIGKIQDSLSSTPSALGKLQDVVNQNAQALNTLVKQLSSNFGAISS
VLNDILSRLDKVEAEVQIDRLITGRLQSLQTYVTQQLIRAAEIRASANLAATKMSECVLGQSKRV
DFCGKGYHLMSFPQSAPHGVVFLHVTYVPAQEKNFTTAPAICHDGKAHFPREGVFVSNGTHWFVT
QRNFYEPQIITTDNTFVSGNCDVVIGIVNNTVYDPLQPELDSFKEELDKYFKNHTSPDVDLGDIS
GINASVVNIQKEIDRLNEVAKNLNESLIDLQELGKYEQGSGYIPEAPRDGQAYVRKDGEWVLLST
FLGRSLEVLFQGPGSLPETGGGSDYKDDDDKGGGGSGGGGSGGGGSGGGGSGGGGSHHHHHH
SEQ ID NO 82: SEQ ID NO 2 + A942P + D614N + N532P + S884C + A893C
MFVFLVLLPLVSSQCVNLTTRTQLPPAYTNSFTRGVYYPDKVFRSSVLHSTQDLFLPFFSNVTWF
HAIHVSGTNGTKRFDNPVLPFNDGVYFASTEKSNIIRGWIFGTTLDSKTQSLLIVNNATNVVIKV
CEFQFCNDPFLGVYYHKNNKSWMESEFRVYSSANNCTFEYVSQPFLMDLEGKQGNFKNLREFVFK
NIDGYFKIYSKHTPINLVRDLPQGFSALEPLVDLPIGINITRFQTLLALHRSYLTPGDSSSGWTA
GAAAYYVGYLQPRTFLLKYNENGTITDAVDCALDPLSETKCTLKSFTVEKGIYQTSNFRVQPTES
IVRFPNITNLCPFGEVFNATRFASVYAWNRKRISNCVADYSVLYNSASFSTFKCYGVSPTKLNDL
CFTNVYADSFVIRGDEVRQIAPGQTGKIADYNYKLPDDFTGCVIAWNSNNLDSKVGGNYNYLYRL
FRKSNLKPFERDISTEIYQAGSTPCNGVEGFNCYFPLQSYGFQPTNGVGYQPYRVVVLSFELLHA
PATVCGPKKSTPLVKNKCVNFNFNGLTGTGVLTESNKKFLPFQQFGRDIADTTDAVRDPQTLEIL
DITPCSFGGVSVITPGTNTSNQVAVLYQNVNCTEVPVAIHADQLTPTWRVYSTGSNVFQTRAGCL
IGAEHVNNSYECDIPIGAGICASYQTQTNSPSRAGSVASQSIIAYTMSLGAENSVAYSNNSIAIP
TNFTISVTTEILPVSMTKTSVDCTMYICGDSTECSNLLLQYGSFCTQLNRALTGIAVEQDKNTQE
VFAQVKQIYKTPPIKDFGGFNFSQILPDPSKPSKRSFIEDLLFNKVTLADAGFIKQYGDCLGDIA
ARDLICAQKFNGLTVLPPLLTDEMIAQYTSALLAGTITCGWTFGAGACLQIPFAMQMAYRFNGIG
VTQNVLYENQKLIANQFNSAIGKIQDSLSSTPSALGKLQDVVNQNAQALNTLVKQLSSNFGAISS
VLNDILSRLDKVEAEVQIDRLITGRLQSLQTYVTQQLIRAAEIRASANLAATKMSECVLGQSKRV
DFCGKGYHLMSFPQSAPHGVVFLHVTYVPAQEKNFTTAPAICHDGKAHFPREGVFVSNGTHWFVT
QRNFYEPQIITTDNTFVSGNCDVVIGIVNNTVYDPLQPELDSFKEELDKYFKNHTSPDVDLGDIS
GINASVVNIQKEIDRLNEVAKNLNESLIDLQELGKYEQGSGYIPEAPRDGQAYVRKDGEWVLLST
FLGRSLEVLFQGPGSLPETGGGSDYKDDDDKGGGGSGGGGSGGGGSGGGGSGGGGSHHHHHH
SEQ ID NO 83: SEQ ID NO 2 + A942P + T572I +
N532P + G880C + F888C
MFVFLVLLPLVSSQCVNLTTRTQLPPAYTNSFTRGVYYPDKVFRSSVLHSTQDLFLPFFSNVTWF
HAIHVSGTNGTKRFDNPVLPFNDGVYFASTEKSNIIRGWIFGTTLDSKTQSLLIVNNATNVVIKV
CEFQFCNDPFLGVYYHKNNKSWMESEFRVYSSANNCTFEYVSQPFLMDLEGKQGNFKNLREFVFK
NIDGYFKIYSKHTPINLVRDLPQGFSALEPLVDLPIGINITRFQTLLALHRSYLTPGDSSSGWTA
GAAAYYVGYLQPRTFLLKYNENGTITDAVDCALDPLSETKCTLKSFTVEKGIYQTSNFRVQPTES
IVRFPNITNLCPFGEVFNATRFASVYAWNRKRISNCVADYSVLYNSASFSTFKCYGVSPTKLNDL
CFTNVYADSFVIRGDEVRQIAPGQTGKIADYNYKLPDDFTGCVIAWNSNNLDSKVGGNYNYLYRL
FRKSNLKPFERDISTEIYQAGSTPCNGVEGFNCYFPLQSYGFQPTNGVGYQPYRVVVLSFELLHA
PATVCGPKKSTPLVKNKCVNFNFNGLTGTGVLTESNKKFLPFQQFGRDIADITDAVRDPQTLEIL
DITPCSFGGVSVITPGTNTSNQVAVLYQDVNCTEVPVAIHADQLTPTWRVYSTGSNVFQTRAGCL
IGAEHVNNSYECDIPIGAGICASYQTQTNSPSRAGSVASQSIIAYTMSLGAENSVAYSNNSIAIP
TNFTISVTTEILPVSMTKTSVDCTMYICGDSTECSNLLLQYGSFCTQLNRALTGIAVEQDKNTQE
VFAQVKQIYKTPPIKDFGGFNFSQILPDPSKPSKRSFIEDLLFNKVTLADAGFIKQYGDCLGDIA
ARDLICAQKFNGLTVLPPLLTDEMIAQYTSALLACTITSGWTCGAGAALQIPFAMQMAYRFNGIG
VTQNVLYENQKLIANQFNSAIGKIQDSLSSTPSALGKLQDVVNQNAQALNTLVKQLSSNFGAISS
VLNDILSRLDKVEAEVQIDRLITGRLQSLQTYVTQQLIRAAEIRASANLAATKMSECVLGQSKRV
DFCGKGYHLMSFPQSAPHGVVFLHVTYVPAQEKNFTTAPAICHDGKAHFPREGVFVSNGTHWFVT
QRNFYEPQIITTDNTFVSGNCDVVIGIVNNTVYDPLQPELDSFKEELDKYFKNHTSPDVDLGDIS
GINASVVNIQKEIDRLNEVAKNLNESLIDLQELGKYEQGSGYIPEAPRDGQAYVRKDGEWVLLST
FLGRSLEVLFQGPGSLPETGGGSDYKDDDDKGGGGSGGGGSGGGGSGGGGSGGGGSHHHHHH
SEQ ID NO 84: SEQ ID NO 2 + A942P + T572I +
N532P + S884C + A893C
MFVFLVLLPLVSSQCVNLTTRTQLPPAYTNSFTRGVYYPDKVFRSSVLHSTQDLFLPFFSNVTWF
HAIHVSGTNGTKRFDNPVLPFNDGVYFASTEKSNIIRGWIFGTTLDSKTQSLLIVNNATNVVIKV
CEFQFCNDPFLGVYYHKNNKSWMESEFRVYSSANNCTFEYVSQPFLMDLEGKQGNFKNLREFVFK
NIDGYFKIYSKHTPINLVRDLPQGFSALEPLVDLPIGINITRFQTLLALHRSYLTPGDSSSGWTA
GAAAYYVGYLQPRTFLLKYNENGTITDAVDCALDPLSETKCTLKSFTVEKGIYQTSNFRVQPTES
IVRFPNITNLCPFGEVFNATRFASVYAWNRKRISNCVADYSVLYNSASFSTFKCYGVSPTKLNDL
CFTNVYADSFVIRGDEVRQIAPGQTGKIADYNYKLPDDFTGCVIAWNSNNLDSKVGGNYNYLYRL
FRKSNLKPFERDISTEIYQAGSTPCNGVEGFNCYFPLQSYGFQPTNGVGYQPYRVVVLSFELLHA
PATVCGPKKSTPLVKNKCVNFNFNGLTGTGVLTESNKKFLPFQQFGRDIADITDAVRDPQTLEIL
DITPCSFGGVSVITPGTNTSNQVAVLYQDVNCTEVPVAIHADQLTPTWRVYSTGSNVFQTRAGCL
IGAEHVNNSYECDIPIGAGICASYQTQTNSPSRAGSVASQSIIAYTMSLGAENSVAYSNNSIAIP
TNFTISVTTEILPVSMTKTSVDCTMYICGDSTECSNLLLQYGSFCTQLNRALTGIAVEQDKNTQE
VFAQVKQIYKTPPIKDFGGFNFSQILPDPSKPSKRSFIEDLLFNKVTLADAGFIKQYGDCLGDIA
ARDLICAQKFNGLTVLPPLLTDEMIAQYTSALLAGTITCGWTFGAGACLQIPFAMQMAYRFNGIG
VTQNVLYENQKLIANQFNSAIGKIQDSLSSTPSALGKLQDVVNQNAQALNTLVKQLSSNFGAISS
VLNDILSRLDKVEAEVQIDRLITGRLQSLQTYVTQQLIRAAEIRASANLAATKMSECVLGQSKRV
DFCGKGYHLMSFPQSAPHGVVFLHVTYVPAQEKNFTTAPAICHDGKAHFPREGVFVSNGTHWFVT
QRNFYEPQIITTDNTFVSGNCDVVIGIVNNTVYDPLQPELDSFKEELDKYFKNHTSPDVDLGDIS
GINASVVNIQKEIDRLNEVAKNLNESLIDLQELGKYEQGSGYIPEAPRDGQAYVRKDGEWVLLST
FLGRSLEVLFQGPGSLPETGGGSDYKDDDDKGGGGGGGGSGGGGSGGGGSGGGGSHHHHHH
SEQ ID NO 85: SEQ ID NO 2 + A892P + D614N + T572I +
N532P
MFVFLVLLPLVSSQCVNLTTRTQLPPAYTNSFTRGVYYPDKVFRSSVLHSTQDLFLPFFSNVTWF
HAIHVSGTNGTKRFDNPVLPFNDGVYFASTEKSNIIRGWIFGTTLDSKTQSLLIVNNATNVVIKV
CEFQFCNDPFLGVYYHKNNKSWMESEFRVYSSANNCTFEYVSQPFLMDLEGKQGNFKNLREFVFK
NIDGYFKIYSKHTPINLVRDLPQGFSALEPLVDLPIGINITRFQTLLALHRSYLTPGDSSSGWTA
GAAAYYVGYLQPRTFLLKYNENGTITDAVDCALDPLSETKCTLKSFTVEKGIYQTSNFRVQPTES
IVRFPNITNLCPFGEVFNATRFASVYAWNRKRISNCVADYSVLYNSASFSTFKCYGVSPTKLNDL
CFTNVYADSFVIRGDEVRQIAPGQTGKIADYNYKLPDDFTGCVIAWNSNNLDSKVGGNYNYLYRL
FRKSNLKPFERDISTEIYQAGSTPCNGVEGFNCYFPLQSYGFQPTNGVGYQPYRVVVLSFELLHA
PATVCGPKKSTPLVKNKCVNFNFNGLTGTGVLTESNKKFLPFQQFGRDIADITDAVRDPQTLEIL
DITPCSFGGVSVITPGTNTSNQVAVLYQNVNCTEVPVAIHADQLTPTWRVYSTGSNVFQTRAGCL
IGAEHVNNSYECDIPIGAGICASYQTQTNSPSRAGSVASQSIIAYTMSLGAENSVAYSNNSIAIP
TNFTISVTTEILPVSMTKTSVDCTMYICGDSTECSNLLLQYGSFCTQLNRALTGIAVEQDKNTQE
VFAQVKQIYKTPPIKDFGGFNFSQILPDPSKPSKRSFIEDLLFNKVTLADAGFIKQYGDCLGDIA
ARDLICAQKFNGLTVLPPLLTDEMIAQYTSALLAGTITSGWTFGAGPALQIPFAMQMAYRFNGIG
VTQNVLYENQKLIANQFNSAIGKIQDSLSSTASALGKLQDVVNQNAQALNTLVKQLSSNFGAISS
VLNDILSRLDKVEAEVQIDRLITGRLQSLQTYVTQQLIRAAEIRASANLAATKMSECVLGQSKRV
DFCGKGYHLMSFPQSAPHGVVFLHVTYVPAQEKNFTTAPAICHDGKAHFPREGVFVSNGTHWFVT
QRNFYEPQIITTDNTFVSGNCDVVIGIVNNTVYDPLQPELDSFKEELDKYFKNHTSPDVDLGDIS
GINASVVNIQKEIDRLNEVAKNLNESLIDLQELGKYEQGSGYIPEAPRDGQAYVRKDGEWVLLST
FLGRSLEVLFQGPGSLPETGGGSDYKDDDDKGGGGSGGGGSGGGGSGGGGSGGGGSHHHHHH
SEQ ID NO 86: SEQ ID NO 2 + A892P + D614N + T572I +
G880C + F888C
MFVFLVLLPLVSSQCVNLTTRTQLPPAYTNSFTRGVYYPDKVFRSSVLHSTQDLFLPFFSNVTWF
HAIHVSGTNGTKRFDNPVLPFNDGVYFASTEKSNIIRGWIFGTTLDSKTQSLLIVNNATNVVIKV
CEFQFCNDPFLGVYYHKNNKSWMESEFRVYSSANNCTFEYVSQPFLMDLEGKQGNFKNLREFVFK
NIDGYFKIYSKHTPINLVRDLPQGFSALEPLVDLPIGINITRFQTLLALHRSYLTPGDSSSGWTA
GAAAYYVGYLQPRTFLLKYNENGTITDAVDCALDPLSETKCTLKSFTVEKGIYQTSNFRVQPTES
IVRFPNITNLCPFGEVFNATRFASVYAWNRKRISNCVADYSVLYNSASFSTFKCYGVSPTKLNDL
CFTNVYADSFVIRGDEVRQIAPGQTGKIADYNYKLPDDFTGCVIAWNSNNLDSKVGGNYNYLYRL
FRKSNLKPFERDISTEIYQAGSTPCNGVEGFNCYFPLQSYGFQPTNGVGYQPYRVVVLSFELLHA
PATVCGPKKSTNLVKNKCVNFNFNGLTGTGVLTESNKKFLPFQQFGRDIADITDAVRDPQTLEIL
DITPCSFGGVSVITPGTNTSNQVAVLYQNVNCTEVPVAIHADQLTPTWRVYSTGSNVFQTRAGCL
IGAEHVNNSYECDIPIGAGICASYQTQTNSPSRAGSVASQSIIAYTMSLGAENSVAYSNNSIAIP
TNFTISVTTEILPVSMTKTSVDCTMYICGDSTECSNLLLQYGSFCTQLNRALTGIAVEQDKNTQE
VFAQVKQIYKTPPIKDFGGFNFSQILPDPSKPSKRSFIEDLLFNKVTLADAGFIKQYGDCLGDIA
ARDLICAQKFNGLTVLPPLLTDEMIAQYTSALLACTITSGWTCGAGPALQIPFAMQMAYRFNGIG
VTQNVLYENQKLIANQFNSAIGKIQDSLSSTASALGKLQDVVNQNAQALNTLVKQLSSNFGAISS
VLNDILSRLDKVEAEVQIDRLITGRLQSLQTYVTQQLIRAAEIRASANLAATKMSECVLGQSKRV
DFCGKGYHLMSFPQSAPHGVVFLHVTYVPAQEKNFTTAPAICHDGKAHFPREGVFVSNGTHWFVT
QRNFYEPQIITTDNTFVSGNCDVVIGIVNNTVYDPLQPELDSFKEELDKYFKNHTSPDVDLGDIS
GINASVVNIQKEIDRLNEVAKNLNESLIDLQELGKYEQGSGYIPEAPRDGQAYVRKDGEWVLLST
FLGRSLEVLFQGPGSLPETGGGSDYKDDDDKGGGGSGGGGGGGGSGGGGSGGGGSHHHHHH
SEQ ID NO 87: SEQ ID NO 2 + A892P + D614N + T572I +
S884C + A893C
MFVFLVLLPLVSSQCVNLTTRTQLPPAYTNSFTRGVYYPDKVFRSSVLHSTQDLFLPFFSNVTWF
HAIHVSGTNGTKRFDNPVLPFNDGVYFASTEKSNIIRGWIFGTTLDSKTQSLLIVNNATNVVIKV
CEFQFCNDPFLGVYYHKNNKSWMESEFRVYSSANNCTFEYVSQPFLMDLEGKQGNFKNLREFVFK
NIDGYFKIYSKHTPINLVRDLPQGFSALEPLVDLPIGINITRFQTLLALHRSYLTPGDSSSGWTA
GAAAYYVGYLQPRTFLLKYNENGTITDAVDCALDPLSETKCTLKSFTVEKGIYQTSNFRVQPTES
IVRFPNITNLCPFGEVFNATRFASVYAWNRKRISNCVADYSVLYNSASFSTFKCYGVSPTKLNDL
CFTNVYADSFVIRGDEVRQIAPGQTGKIADYNYKLPDDFTGCVIAWNSNNLDSKVGGNYNYLYRL
FRKSNLKPFERDISTEIYQAGSTPCNGVEGFNCYFPLQSYGFQPTNGVGYQPYRVVVLSFELLHA
PATVCGPKKSTNLVKNKCVNFNFNGLTGTGVLTESNKKFLPFQQFGRDIADITDAVRDPQTLEIL
DITPCSFGGVSVITPGTNTSNQVAVLYQNVNCTEVPVAIHADQLTPTWRVYSTGSNVFQTRAGCL
IGAEHVNNSYECDIPIGAGICASYQTQTNSPSRAGSVASQSIIAYTMSLGAENSVAYSNNSIAIP
TNFTISVTTEILPVSMTKTSVDCTMYICGDSTECSNLLLQYGSFCTQLNRALTGIAVEQDKNTQE
VFAQVKQIYKTPPIKDFGGFNFSQILPDPSKPSKRSFIEDLLFNKVTLADAGFIKQYGDCLGDIA
ARDLICAQKFNGLTVLPPLLTDEMIAQYTSALLAGTITCGWTFGAGPCLQIPFAMQMAYRFNGIG
VTQNVLYENQKLIANQFNSAIGKIQDSLSSTASALGKLQDVVNQNAQALNTLVKQLSSNFGAISS
VLNDILSRLDKVEAEVQIDRLITGRLQSLQTYVTQQLIRAAEIRASANLAATKMSECVLGQSKRV
DFCGKGYHLMSFPQSAPHGVVFLHVTYVPAQEKNFTTAPAICHDGKAHFPREGVFVSNGTHWFVT
QRNFYEPQIITTDNTFVSGNCDVVIGIVNNTVYDPLQPELDSFKEELDKYFKNHTSPDVDLGDIS
GINASVVNIQKEIDRLNEVAKNLNESLIDLQELGKYEQGSGYIPEAPRDGQAYVRKDGEWVLLST
FLGRSLEVLFQGPGSLPETGGGSDYKDDDDKGGGGSGGGGSGGGGSGGGGSGGGGSHHHHHH
SEQ ID NO 88: SEQ ID NO 2 + A892P + D614N + N532P + G880C + F888C
MFVFLVLLPLVSSQCVNLTTRTQLPPAYTNSFTRGVYYPDKVFRSSVLHSTQDLFLPFFSNVTWF
HAIHVSGTNGTKRFDNPVLPFNDGVYFASTEKSNIIRGWIFGTTLDSKTQSLLIVNNATNVVIKV
CEFQFCNDPFLGVYYHKNNKSWMESEFRVYSSANNCTFEYVSQPFLMDLEGKQGNFKNLREFVFK
NIDGYFKIYSKHTPINLVRDLPQGFSALEPLVDLPIGINITRFQTLLALHRSYLTPGDSSSGWTA
GAAAYYVGYLQPRTFLLKYNENGTITDAVDCALDPLSETKCTLKSFTVEKGIYQTSNFRVQPTES
IVRFPNITNLCPFGEVFNATRFASVYAWNRKRISNCVADYSVLYNSASFSTFKCYGVSPTKLNDL
CFTNVYADSFVIRGDEVRQIAPGQTGKIADYNYKLPDDFTGCVIAWNSNNLDSKVGGNYNYLYRL
FRKSNLKPFERDISTEIYQAGSTPCNGVEGFNCYFPLQSYGFQPTNGVGYQPYRVVVLSFELLHA
PATVCGPKKSTPLVKNKCVNFNFNGLTGTGVLTESNKKFLPFQQFGRDIADTTDAVRDPQTLEIL
DITPCSFGGVSVITPGTNTSNQVAVLYQNVNCTEVPVAIHADQLTPTWRVYSTGSNVFQTRAGCL
IGAEHVNNSYECDIPIGAGICASYQTQTNSPSRAGSVASQSIIAYTMSLGAENSVAYSNNSIAIP
TNFTISVTTEILPVSMTKTSVDCTMYICGDSTECSNLLLQYGSFCTQLNRALTGIAVEQDKNTQE
VFAQVKQIYKTPPIKDFGGFNFSQILPDPSKPSKRSFIEDLLFNKVTLADAGFIKQYGDCLGDIA
ARDLICAQKFNGLTVLPPLLTDEMIAQYTSALLACTITSGWTCGAGPALQIPFAMQMAYRFNGIG
VTQNVLYENQKLIANQFNSAIGKIQDSLSSTASALGKLQDVVNQNAQALNTLVKQLSSNFGAISS
VLNDILSRLDKVEAEVQIDRLITGRLQSLQTYVTQQLIRAAEIRASANLAATKMSECVLGQSKRV
DFCGKGYHLMSFPQSAPHGVVFLHVTYVPAQEKNFTTAPAICHDGKAHFPREGVFVSNGTHWFVT
QRNFYEPQIITTDNTFVSGNCDVVIGIVNNTVYDPLQPELDSFKEELDKYFKNHTSPDVDLGDIS
GINASVVNIQKEIDRLNEVAKNLNESLIDLQELGKYEQGSGYIPEAPRDGQAYVRKDGEWVLLST
FLGRSLEVLFQGPGSLPETGGGSDYKDDDDKGGGGSGGGGSGGGGSGGGGSGGGGSHHHHHH
SEQ ID NO 89: SEQ ID NO 2 + A892P + D614N + N532P + S884C + A893C
MFVFLVLLPLVSSQCVNLTTRTQLPPAYTNSFTRGVYYPDKVFRSSVLHSTQDLFLPFFSNVTWF
HAIHVSGTNGTKRFDNPVLPFNDGVYFASTEKSNIIRGWIFGTTLDSKTQSLLIVNNATNVVIKV
CEFQFCNDPFLGVYYHKNNKSWMESEFRVYSSANNCTFEYVSQPFLMDLEGKQGNFKNLREFVFK
NIDGYFKIYSKHTPINLVRDLPQGFSALEPLVDLPIGINITRFQTLLALHRSYLTPGDSSSGWTA
GAAAYYVGYLQPRTFLLKYNENGTITDAVDCALDPLSETKCTLKSFTVEKGIYQTSNFRVQPTES
IVRFPNITNLCPFGEVFNATRFASVYAWNRKRISNCVADYSVLYNSASFSTFKCYGVSPTKLNDL
CFTNVYADSFVIRGDEVRQIAPGQTGKIADYNYKLPDDFTGCVIAWNSNNLDSKVGGNYNYLYRL
FRKSNLKPFERDISTEIYQAGSTPCNGVEGFNCYFPLQSYGFQPTNGVGYQPYRVVVLSFELLHA
PATVCGPKKSTPLVKNKCVNFNFNGLTGTGVLTESNKKFLPFQQFGRDIADTTDAVRDPQTLEIL
DITPCSFGGVSVITPGTNTSNQVAVLYQNVNCTEVPVAIHADQLTPTWRVYSTGSNVFQTRAGCL
IGAEHVNNSYECDIPIGAGICASYQTQTNSPSRAGSVASQSIIAYTMSLGAENSVAYSNNSIAIP
TNFTISVTTEILPVSMTKTSVDCTMYICGDSTECSNLLLQYGSFCTQLNRALTGIAVEQDKNTQE
VFAQVKQIYKTPPIKDFGGFNFSQILPDPSKPSKRSFIEDLLFNKVTLADAGFIKQYGDCLGDIA
ARDLICAQKFNGLTVLPPLLTDEMIAQYTSALLAGTITCGWTFGAGPCLQIPFAMQMAYRFNGIG
VTQNVLYENQKLIANQFNSAIGKIQDSLSSTASALGKLQDVVNQNAQALNTLVKQLSSNFGAISS
VLNDILSRLDKVEAEVQIDRLITGRLQSLQTYVTQQLIRAAEIRASANLAATKMSECVLGQSKRV
DFCGKGYHLMSFPQSAPHGVVFLHVTYVPAQEKNFTTAPAICHDGKAHFPREGVFVSNGTHWFVT
QRNFYEPQIITTDNTFVSGNCDVVIGIVNNTVYDPLQPELDSFKEELDKYFKNHTSPDVDLGDIS
GINASVVNIQKEIDRLNEVAKNLNESLIDLQELGKYEQGSGYIPEAPRDGQAYVRKDGEWVLLST
FLGRSLEVLFQGPGSLPETGGGSDYKDDDDKGGGGSGGGGSGGGGSGGGGSGGGGSHHHHHH
SEQ ID NO 90: SEQ ID NO 2 + A892P + T572I +
N532P + G880C + F888C
MFVFLVLLPLVSSQCVNLTTRTQLPPAYTNSFTRGVYYPDKVFRSSVLHSTQDLFLPFFSNVTWF
HAIHVSGTNGTKRFDNPVLPFNDGVYFASTEKSNIIRGWIFGTTLDSKTQSLLIVNNATNVVIKV
CEFQFCNDPFLGVYYHKNNKSWMESEFRVYSSANNCTFEYVSQPFLMDLEGKQGNFKNLREFVFK
NIDGYFKIYSKHTPINLVRDLPQGFSALEPLVDLPIGINITRFQTLLALHRSYLTPGDSSSGWTA
GAAAYYVGYLQPRTFLLKYNENGTITDAVDCALDPLSETKCTLKSFTVEKGIYQTSNFRVQPTES
IVRFPNITNLCPFGEVFNATRFASVYAWNRKRISNCVADYSVLYNSASFSTFKCYGVSPTKLNDL
CFTNVYADSFVIRGDEVRQIAPGQTGKIADYNYKLPDDFTGCVIAWNSNNLDSKVGGNYNYLYRL
FRKSNLKPFERDISTEIYQAGSTPCNGVEGFNCYFPLQSYGFQPTNGVGYQPYRVVVLSFELLHA
PATVCGPKKSTPLVKNKCVNFNFNGLTGTGVLTESNKKFLPFQQFGRDIADITDAVRDPQTLEIL
DITPCSFGGVSVITPGTNTSNQVAVLYQDVNCTEVPVAIHADQLTPTWRVYSTGSNVFQTRAGCL
IGAEHVNNSYECDIPIGAGICASYQTQTNSPSRAGSVASQSIIAYTMSLGAENSVAYSNNSIAIP
TNFTISVTTEILPVSMTKTSVDCTMYICGDSTECSNLLLQYGSFCTQLNRALTGIAVEQDKNTQE
VFAQVKQIYKTPPIKDFGGFNFSQILPDPSKPSKRSFIEDLLFNKVTLADAGFIKQYGDCLGDIA
ARDLICAQKFNGLTVLPPLLTDEMIAQYTSALLACTITSGWTCGAGPALQIPFAMQMAYRFNGIG
VTQNVLYENQKLIANQFNSAIGKIQDSLSSTASALGKLQDVVNQNAQALNTLVKQLSSNFGAISS
VLNDILSRLDKVEAEVQIDRLITGRLQSLQTYVTQQLIRAAEIRASANLAATKMSECVLGQSKRV
DFCGKGYHLMSFPQSAPHGVVFLHVTYVPAQEKNFTTAPAICHDGKAHFPREGVFVSNGTHWFVT
QRNFYEPQIITTDNTFVSGNCDVVIGIVNNTVYDPLQPELDSFKEELDKYFKNHTSPDVDLGDIS
GINASVVNIQKEIDRLNEVAKNLNESLIDLQELGKYEQGSGYIPEAPRDGQAYVRKDGEWVLLST
FLGRSLEVLFQGPGSLPETGGGSDYKDDDDKGGGGSGGGGSGGGGSGGGGSGGGGSHHHHHH
SEQ ID NO 91: SEQ ID NO 2 + A892P + T572I +
N532P + S884C + A893C
MFVFLVLLPLVSSQCVNLTTRTQLPPAYTNSFTRGVYYPDKVFRSSVLHSTQDLFLPFFSNVTWF
HAIHVSGTNGTKRFDNPVLPFNDGVYFASTEKSNIIRGWIFGTTLDSKTQSLLIVNNATNVVIKV
CEFQFCNDPFLGVYYHKNNKSWMESEFRVYSSANNCTFEYVSQPFLMDLEGKQGNFKNLREFVFK
NIDGYFKIYSKHTPINLVRDLPQGFSALEPLVDLPIGINITRFQTLLALHRSYLTPGDSSSGWTA
GAAAYYVGYLQPRTFLLKYNENGTITDAVDCALDPLSETKCTLKSFTVEKGIYQTSNFRVQPTES
IVRFPNITNLCPFGEVFNATRFASVYAWNRKRISNCVADYSVLYNSASFSTFKCYGVSPTKLNDL
CFTNVYADSFVIRGDEVRQIAPGQTGKIADYNYKLPDDFTGCVIAWNSNNLDSKVGGNYNYLYRL
FRKSNLKPFERDISTEIYQAGSTPCNGVEGFNCYFPLQSYGFQPTNGVGYQPYRVVVLSFELLHA
PATVCGPKKSTPLVKNKCVNFNFNGLTGTGVLTESNKKFLPFQQFGRDIADITDAVRDPQTLEIL
DITPCSFGGVSVITPGTNTSNQVAVLYQDVNCTEVPVAIHADQLTPTWRVYSTGSNVFQTRAGCL
IGAEHVNNSYECDIPIGAGICASYQTQTNSPSRAGSVASQSIIAYTMSLGAENSVAYSNNSIAIP
TNFTISVTTEILPVSMTKTSVDCTMYICGDSTECSNLLLQYGSFCTQLNRALTGIAVEQDKNTQE
VFAQVKQIYKTPPIKDFGGFNFSQILPDPSKPSKRSFIEDLLFNKVTLADAGFIKQYGDCLGDIA
ARDLICAQKFNGLTVLPPLLTDEMIAQYTSALLAGTITCGWTFGAGPCLQIPFAMQMAYRFNGIG
VTQNVLYENQKLIANQFNSAIGKIQDSLSSTASALGKLQDVVNQNAQALNTLVKQLSSNFGAISS
VLNDILSRLDKVEAEVQIDRLITGRLQSLQTYVTQQLIRAAEIRASANLAATKMSECVLGQSKRV
DFCGKGYHLMSFPQSAPHGVVFLHVTYVPAQEKNFTTAPAICHDGKAHFPREGVFVSNGTHWFVT
QRNFYEPQIITTDNTFVSGNCDVVIGIVNNTVYDPLQPELDSFKEELDKYFKNHTSPDVDLGDIS
GINASVVNIQKEIDRLNEVAKNLNESLIDLQELGKYEQGSGYIPEAPRDGQAYVRKDGEWVLLST
FLGRSLEVLFQGPGSLPETGGGSDYKDDDDKGGGGSGGGGSGGGGSGGGGSGGGGSHHHHHH
SEQ ID NO 92: SEQ ID NO 2 + D614N + T572I +
N532P + G880C + F888C
MFVFLVLLPLVSSQCVNLTTRTQLPPAYTNSFTRGVYYPDKVFRSSVLHSTQDLFLPFFSNVTWF
HAIHVSGTNGTKRFDNPVLPFNDGVYFASTEKSNIIRGWIFGTTLDSKTQSLLIVNNATNVVIKV
CEFQFCNDPFLGVYYHKNNKSWMESEFRVYSSANNCTFEYVSQPFLMDLEGKQGNFKNLREFVFK
NIDGYFKIYSKHTPINLVRDLPQGFSALEPLVDLPIGINITRFQTLLALHRSYLTPGDSSSGWTA
GAAAYYVGYLQPRTFLLKYNENGTITDAVDCALDPLSETKCTLKSFTVEKGIYQTSNFRVQPTES
IVRFPNITNLCPFGEVFNATRFASVYAWNRKRISNCVADYSVLYNSASFSTFKCYGVSPTKLNDL
CFTNVYADSFVIRGDEVRQIAPGQTGKIADYNYKLPDDFTGCVIAWNSNNLDSKVGGNYNYLYRL
FRKSNLKPFERDISTEIYQAGSTPCNGVEGFNCYFPLQSYGFQPTNGVGYQPYRVVVLSFELLHA
PATVCGPKKSTPLVKNKCVNFNFNGLTGTGVLTESNKKFLPFQQFGRDIADITDAVRDPQTLEIL
DITPCSFGGVSVITPGTNTSNQVAVLYQNVNCTEVPVAIHADQLTPTWRVYSTGSNVFQTRAGCL
IGAEHVNNSYECDIPIGAGICASYQTQTNSPSRAGSVASQSIIAYTMSLGAENSVAYSNNSIAIP
TNFTISVTTEILPVSMTKTSVDCTMYICGDSTECSNLLLQYGSFCTQLNRALTGIAVEQDKNTQE
VFAQVKQIYKTPPIKDFGGFNFSQILPDPSKPSKRSFIEDLLFNKVTLADAGFIKQYGDCLGDIA
ARDLICAQKFNGLTVLPPLLTDEMIAQYTSALLACTITSGWTCGAGAALQIPFAMQMAYRFNGIG
VTQNVLYENQKLIANQFNSAIGKIQDSLSSTASALGKLQDVVNQNAQALNTLVKQLSSNFGAISS
VLNDILSRLDKVEAEVQIDRLITGRLQSLQTYVTQQLIRAAEIRASANLAATKMSECVLGQSKRV
DFCGKGYHLMSFPQSAPHGVVFLHVTYVPAQEKNFTTAPAICHDGKAHFPREGVFVSNGTHWFVT
QRNFYEPQIITTDNTFVSGNCDVVIGIVNNTVYDPLQPELDSFKEELDKYFKNHTSPDVDLGDIS
GINASVVNIQKEIDRLNEVAKNLNESLIDLQELGKYEQGSGYIPEAPRDGQAYVRKDGEWVLLST
FLGRSLEVLFQGPGSLPETGGGSDYKDDDDKGGGGSGGGGSGGGGSGGGGSGGGGSHHHHHH
SEQ ID NO 93: SEQ ID NO 2 + D614N + T572I +
N532P + S884C + A893C
MFVFLVLLPLVSSQCVNLTTRTQLPPAYTNSFTRGVYYPDKVFRSSVLHSTQDLFLPFFSNVTWF
HAIHVSGTNGTKRFDNPVLPFNDGVYFASTEKSNIIRGWIFGTTLDSKTQSLLIVNNATNVVIKV
CEFQFCNDPFLGVYYHKNNKSWMESEFRVYSSANNCTFEYVSQPFLMDLEGKQGNFKNLREFVFK
NIDGYFKIYSKHTPINLVRDLPQGFSALEPLVDLPIGINITRFQTLLALHRSYLTPGDSSSGWTA
GAAAYYVGYLQPRTFLLKYNENGTITDAVDCALDPLSETKCTLKSFTVEKGIYQTSNFRVQPTES
IVRFPNITNLCPFGEVFNATRFASVYAWNRKRISNCVADYSVLYNSASFSTFKCYGVSPTKLNDL
CFTNVYADSFVIRGDEVRQIAPGQTGKIADYNYKLPDDFTGCVIAWNSNNLDSKVGGNYNYLYRL
FRKSNLKPFERDISTEIYQAGSTPCNGVEGFNCYFPLQSYGFQPTNGVGYQPYRVVVLSFELLHA
PATVCGPKKSTPLVKNKCVNFNFNGLTGTGVLTESNKKFLPFQQFGRDIADITDAVRDPQTLEIL
DITPCSFGGVSVITPGTNTSNQVAVLYQNVNCTEVPVAIHADQLTPTWRVYSTGSNVFQTRAGCL
IGAEHVNNSYECDIPIGAGICASYQTQTNSPSRAGSVASQSIIAYTMSLGAENSVAYSNNSIAIP
TNFTISVTTEILPVSMTKTSVDCTMYICGDSTECSNLLLQYGSFCTQLNRALTGIAVEQDKNTQE
VFAQVKQIYKTPPIKDFGGFNFSQILPDPSKPSKRSFIEDLLFNKVTLADAGFIKQYGDCLGDIA
ARDLICAQKFNGLTVLPPLLTDEMIAQYTSALLAGTITCGWTFGAGACLQIPFAMQMAYRFNGIG
VTQNVLYENQKLIANQFNSAIGKIQDSLSSTASALGKLQDVVNQNAQALNTLVKQLSSNFGAISS
VLNDILSRLDKVEAEVQIDRLITGRLQSLQTYVTQQLIRAAEIRASANLAATKMSECVLGQSKRV
DFCGKGYHLMSFPQSAPHGVVFLHVTYVPAQEKNFTTAPAICHDGKAHFPREGVFVSNGTHWFVT
QRNFYEPQIITTDNTFVSGNCDVVIGIVNNTVYDPLQPELDSFKEELDKYFKNHTSPDVDLGDIS
GINASVVNIQKEIDRLNEVAKNLNESLIDLQELGKYEQGSGYIPEAPRDGQAYVRKDGEWVLLST
FLGRSLEVLFQGPGSLPETGGGSDYKDDDDKGGGGSGGGGSGGGGSGGGGSGGGGSHHHHHH
SEQ ID NO 94: SEQ ID NO 2 + A942P + A892P + D614N + T572I +
N532P
MFVFLVLLPLVSSQCVNLTTRTQLPPAYTNSFTRGVYYPDKVFRSSVLHSTQDLFLPFFSNVTWF
HAIHVSGTNGTKRFDNPVLPFNDGVYFASTEKSNIIRGWIFGTTLDSKTQSLLIVNNATNVVIKV
CEFQFCNDPFLGVYYHKNNKSWMESEFRVYSSANNCTFEYVSQPFLMDLEGKQGNFKNLREFVFK
NIDGYFKIYSKHTPINLVRDLPQGFSALEPLVDLPIGINITRFQTLLALHRSYLTPGDSSSGWTA
GAAAYYVGYLQPRTFLLKYNENGTITDAVDCALDPLSETKCTLKSFTVEKGIYQTSNFRVQPTES
IVRFPNITNLCPFGEVFNATRFASVYAWNRKRISNCVADYSVLYNSASFSTFKCYGVSPTKLNDL
CFTNVYADSFVIRGDEVRQIAPGQTGKIADYNYKLPDDFTGCVIAWNSNNLDSKVGGNYNYLYRL
FRKSNLKPFERDISTEIYQAGSTPCNGVEGFNCYFPLQSYGFQPTNGVGYQPYRVVVLSFELLHA
PATVCGPKKSTPLVKNKCVNFNFNGLTGTGVLTESNKKFLPFQQFGRDIADITDAVRDPQTLEIL
DITPCSFGGVSVITPGTNTSNQVAVLYQNVNCTEVPVAIHADQLTPTWRVYSTGSNVFQTRAGCL
IGAEHVNNSYECDIPIGAGICASYQTQTNSPSRAGSVASQSIIAYTMSLGAENSVAYSNNSIAIP
TNFTISVTTEILPVSMTKTSVDCTMYICGDSTECSNLLLQYGSFCTQLNRALTGIAVEQDKNTQE
VFAQVKQIYKTPPIKDFGGFNFSQILPDPSKPSKRSFIEDLLFNKVTLADAGFIKQYGDCLGDIA
ARDLICAQKFNGLTVLPPLLTDEMIAQYTSALLAGTITSGWTFGAGPALQIPFAMQMAYRFNGIG
VTQNVLYENQKLIANQFNSAIGKIQDSLSSTPSALGKLQDVVNQNAQALNTLVKQLSSNFGAISS
VLNDILSRLDKVEAEVQIDRLITGRLQSLQTYVTQQLIRAAEIRASANLAATKMSECVLGQSKRV
DFCGKGYHLMSFPQSAPHGVVFLHVTYVPAQEKNFTTAPAICHDGKAHFPREGVFVSNGTHWFVT
QRNFYEPQIITTDNTFVSGNCDVVIGIVNNTVYDPLQPELDSFKEELDKYFKNHTSPDVDLGDIS
GINASVVNIQKEIDRLNEVAKNLNESLIDLQELGKYEQGSGYIPEAPRDGQAYVRKDGEWVLLST
FLGRSLEVLFQGPGSLPETGGGSDYKDDDDKGGGGSGGGGSGGGGSGGGGSGGGGSHHHHHH
SEQ ID NO 95: SEQ ID NO 2 + A942P + A892P + D614N + T572I +
G880C + F888C
MFVFLVLLPLVSSQCVNLTTRTQLPPAYTNSFTRGVYYPDKVFRSSVLHSTQDLFLPFFSNVTWF
HAIHVSGTNGTKRFDNPVLPFNDGVYFASTEKSNIIRGWIFGTTLDSKTQSLLIVNNATNVVIKV
CEFQFCNDPFLGVYYHKNNKSWMESEFRVYSSANNCTFEYVSQPFLMDLEGKQGNFKNLREFVFK
NIDGYFKIYSKHTPINLVRDLPQGFSALEPLVDLPIGINITRFQTLLALHRSYLTPGDSSSGWTA
GAAAYYVGYLQPRTFLLKYNENGTITDAVDCALDPLSETKCTLKSFTVEKGIYQTSNFRVQPTES
IVRFPNITNLCPFGEVFNATRFASVYAWNRKRISNCVADYSVLYNSASFSTFKCYGVSPTKLNDL
CFTNVYADSFVIRGDEVRQIAPGQTGKIADYNYKLPDDFTGCVIAWNSNNLDSKVGGNYNYLYRL
FRKSNLKPFERDISTEIYQAGSTPCNGVEGFNCYFPLQSYGFQPTNGVGYQPYRVVVLSFELLHA
PATVCGPKKSTNLVKNKCVNFNFNGLTGTGVLTESNKKFLPFQQFGRDIADITDAVRDPQTLEIL
DITPCSFGGVSVITPGTNTSNQVAVLYQNVNCTEVPVAIHADQLTPTWRVYSTGSNVFQTRAGCL
IGAEHVNNSYECDIPIGAGICASYQTQTNSPSRAGSVASQSIIAYTMSLGAENSVAYSNNSIAIP
TNFTISVTTEILPVSMTKTSVDCTMYICGDSTECSNLLLQYGSFCTQLNRALTGIAVEQDKNTQE
VFAQVKQIYKTPPIKDFGGFNFSQILPDPSKPSKRSFIEDLLFNKVTLADAGFIKQYGDCLGDIA
ARDLICAQKFNGLTVLPPLLTDEMIAQYTSALLACTITSGWTCGAGPALQIPFAMQMAYRFNGIG
VTQNVLYENQKLIANQFNSAIGKIQDSLSSTPSALGKLQDVVNQNAQALNTLVKQLSSNFGAISS
VLNDILSRLDKVEAEVQIDRLITGRLQSLQTYVTQQLIRAAEIRASANLAATKMSECVLGQSKRV
DFCGKGYHLMSFPQSAPHGVVFLHVTYVPAQEKNFTTAPAICHDGKAHFPREGVFVSNGTHWFVT
QRNFYEPQIITTDNTFVSGNCDVVIGIVNNTVYDPLQPELDSFKEELDKYFKNHTSPDVDLGDIS
GINASVVNIQKEIDRLNEVAKNLNESLIDLQELGKYEQGSGYIPEAPRDGQAYVRKDGEWVLLST
FLGRSLEVLFQGPGSLPETGGGSDYKDDDDKGGGGSGGGGSGGGGSGGGGSGGGGSHHHHHH
SEQ ID NO 96: SEQ ID NO 2 + A942P + A892P + D614N + T572I +
S884C + A893C
MFVFLVLLPLVSSQCVNLTTRTQLPPAYTNSFTRGVYYPDKVFRSSVLHSTQDLFLPFFSNVTWF
HAIHVSGTNGTKRFDNPVLPFNDGVYFASTEKSNIIRGWIFGTTLDSKTQSLLIVNNATNVVIKV
CEFQFCNDPFLGVYYHKNNKSWMESEFRVYSSANNCTFEYVSQPFLMDLEGKQGNFKNLREFVFK
NIDGYFKIYSKHTPINLVRDLPQGFSALEPLVDLPIGINITRFQTLLALHRSYLTPGDSSSGWTA
GAAAYYVGYLQPRTFLLKYNENGTITDAVDCALDPLSETKCTLKSFTVEKGIYQTSNFRVQPTES
IVRFPNITNLCPFGEVFNATRFASVYAWNRKRISNCVADYSVLYNSASFSTFKCYGVSPTKLNDL
CFTNVYADSFVIRGDEVRQIAPGQTGKIADYNYKLPDDFTGCVIAWNSNNLDSKVGGNYNYLYRL
FRKSNLKPFERDISTEIYQAGSTPCNGVEGFNCYFPLQSYGFQPTNGVGYQPYRVVVLSFELLHA
PATVCGPKKSTNLVKNKCVNFNFNGLTGTGVLTESNKKFLPFQQFGRDIADITDAVRDPQTLEIL
DITPCSFGGVSVITPGTNTSNQVAVLYQNVNCTEVPVAIHADQLTPTWRVYSTGSNVFQTRAGCL
IGAEHVNNSYECDIPIGAGICASYQTQTNSPSRAGSVASQSIIAYTMSLGAENSVAYSNNSIAIP
TNFTISVTTEILPVSMTKTSVDCTMYICGDSTECSNLLLQYGSFCTQLNRALTGIAVEQDKNTQE
VFAQVKQIYKTPPIKDFGGFNFSQILPDPSKPSKRSFIEDLLFNKVTLADAGFIKQYGDCLGDIA
ARDLICAQKFNGLTVLPPLLTDEMIAQYTSALLAGTITCGWTFGAGPCLQIPFAMQMAYRFNGIG
VTQNVLYENQKLIANQFNSAIGKIQDSLSSTPSALGKLQDVVNQNAQALNTLVKQLSSNFGAISS
VLNDILSRLDKVEAEVQIDRLITGRLQSLQTYVTQQLIRAAEIRASANLAATKMSECVLGQSKRV
DFCGKGYHLMSFPQSAPHGVVFLHVTYVPAQEKNFTTAPAICHDGKAHFPREGVFVSNGTHWFVT
QRNFYEPQIITTDNTFVSGNCDVVIGIVNNTVYDPLQPELDSFKEELDKYFKNHTSPDVDLGDIS
GINASVVNIQKEIDRLNEVAKNLNESLIDLQELGKYEQGSGYIPEAPRDGQAYVRKDGEWVLLST
FLGRSLEVLFQGPGSLPETGGGSDYKDDDDKGGGGSGGGGSGGGGSGGGGSGGGGSHHHHHH
SEQ ID NO 97: SEQ ID NO 2 + A942P + A892P + D614N + N532P + G880C + F888C
MFVFLVLLPLVSSQCVNLTTRTQLPPAYTNSFTRGVYYPDKVFRSSVLHSTQDLFLPFFSNVTWF
HAIHVSGTNGTKRFDNPVLPFNDGVYFASTEKSNIIRGWIFGTTLDSKTQSLLIVNNATNVVIKV
CEFQFCNDPFLGVYYHKNNKSWMESEFRVYSSANNCTFEYVSQPFLMDLEGKQGNFKNLREFVFK
NIDGYFKIYSKHTPINLVRDLPQGFSALEPLVDLPIGINITRFQTLLALHRSYLTPGDSSSGWTA
GAAAYYVGYLQPRTFLLKYNENGTITDAVDCALDPLSETKCTLKSFTVEKGIYQTSNFRVQPTES
IVRFPNITNLCPFGEVFNATRFASVYAWNRKRISNCVADYSVLYNSASFSTFKCYGVSPTKLNDL
CFTNVYADSFVIRGDEVRQIAPGQTGKIADYNYKLPDDFTGCVIAWNSNNLDSKVGGNYNYLYRL
FRKSNLKPFERDISTEIYQAGSTPCNGVEGFNCYFPLQSYGFQPTNGVGYQPYRVVVLSFELLHA
PATVCGPKKSTPLVKNKCVNFNFNGLTGTGVLTESNKKFLPFQQFGRDIADTTDAVRDPQTLEIL
DITPCSFGGVSVITPGTNTSNQVAVLYQNVNCTEVPVAIHADQLTPTWRVYSTGSNVFQTRAGCL
IGAEHVNNSYECDIPIGAGICASYQTQTNSPSRAGSVASQSIIAYTMSLGAENSVAYSNNSIAIP
TNFTISVTTEILPVSMTKTSVDCTMYICGDSTECSNLLLQYGSFCTQLNRALTGIAVEQDKNTQE
VFAQVKQIYKTPPIKDFGGFNFSQILPDPSKPSKRSFIEDLLFNKVTLADAGFIKQYGDCLGDIA
ARDLICAQKFNGLTVLPPLLTDEMIAQYTSALLACTITSGWTCGAGPALQIPFAMQMAYRFNGIG
VTQNVLYENQKLIANQFNSAIGKIQDSLSSTPSALGKLQDVVNQNAQALNTLVKQLSSNFGAISS
VLNDILSRLDKVEAEVQIDRLITGRLQSLQTYVTQQLIRAAEIRASANLAATKMSECVLGQSKRV
DFCGKGYHLMSFPQSAPHGVVFLHVTYVPAQEKNFTTAPAICHDGKAHFPREGVFVSNGTHWFVT
QRNFYEPQIITTDNTFVSGNCDVVIGIVNNTVYDPLQPELDSFKEELDKYFKNHTSPDVDLGDIS
GINASVVNIQKEIDRLNEVAKNLNESLIDLQELGKYEQGSGYIPEAPRDGQAYVRKDGEWVLLST
FLGRSLEVLFQGPGSLPETGGGSDYKDDDDKGGGGSGGGGSGGGGSGGGGSGGGGSHHHHHH
SEQ ID NO 98: SEQ ID NO 2 + A942P + A892P + D614N + N532P + S884C + A893C
MFVFLVLLPLVSSQCVNLTTRTQLPPAYTNSFTRGVYYPDKVFRSSVLHSTQDLFLPFFSNVTWF
HAIHVSGTNGTKRFDNPVLPFNDGVYFASTEKSNIIRGWIFGTTLDSKTQSLLIVNNATNVVIKV
CEFQFCNDPFLGVYYHKNNKSWMESEFRVYSSANNCTFEYVSQPFLMDLEGKQGNFKNLREFVFK
NIDGYFKIYSKHTPINLVRDLPQGFSALEPLVDLPIGINITRFQTLLALHRSYLTPGDSSSGWTA
GAAAYYVGYLQPRTFLLKYNENGTITDAVDCALDPLSETKCTLKSFTVEKGIYQTSNFRVQPTES
IVRFPNITNLCPFGEVFNATRFASVYAWNRKRISNCVADYSVLYNSASFSTFKCYGVSPTKLNDL
CFTNVYADSFVIRGDEVRQIAPGQTGKIADYNYKLPDDFTGCVIAWNSNNLDSKVGGNYNYLYRL
FRKSNLKPFERDISTEIYQAGSTPCNGVEGFNCYFPLQSYGFQPTNGVGYQPYRVVVLSFELLHA
PATVCGPKKSTPLVKNKCVNFNFNGLTGTGVLTESNKKFLPFQQFGRDIADTTDAVRDPQTLEIL
DITPCSFGGVSVITPGTNTSNQVAVLYQNVNCTEVPVAIHADQLTPTWRVYSTGSNVFQTRAGCL
IGAEHVNNSYECDIPIGAGICASYQTQTNSPSRAGSVASQSIIAYTMSLGAENSVAYSNNSIAIP
TNFTISVTTEILPVSMTKTSVDCTMYICGDSTECSNLLLQYGSFCTQLNRALTGIAVEQDKNTQE
VFAQVKQIYKTPPIKDFGGFNFSQILPDPSKPSKRSFIEDLLFNKVTLADAGFIKQYGDCLGDIA
ARDLICAQKFNGLTVLPPLLTDEMIAQYTSALLAGTITCGWTFGAGPCLQIPFAMQMAYRFNGIG
VTQNVLYENQKLIANQFNSAIGKIQDSLSSTPSALGKLQDVVNQNAQALNTLVKQLSSNFGAISS
VLNDILSRLDKVEAEVQIDRLITGRLQSLQTYVTQQLIRAAEIRASANLAATKMSECVLGQSKRV
DFCGKGYHLMSFPQSAPHGVVFLHVTYVPAQEKNFTTAPAICHDGKAHFPREGVFVSNGTHWFVT
QRNFYEPQIITTDNTFVSGNCDVVIGIVNNTVYDPLQPELDSFKEELDKYFKNHTSPDVDLGDIS
GINASVVNIQKEIDRLNEVAKNLNESLIDLQELGKYEQGSGYIPEAPRDGQAYVRKDGEWVLLST
FLGRSLEVLFQGPGSLPETGGGSDYKDDDDKGGGGSGGGGSGGGGSGGGGSGGGGSHHHHHH
SEQ ID NO 99: SEQ ID NO 2 + A942P + A892P + T572I +
N532P + G880C + F888C
MFVFLVLLPLVSSQCVNLTTRTQLPPAYTNSFTRGVYYPDKVFRSSVLHSTQDLFLPFFSNVTWF
HAIHVSGTNGTKRFDNPVLPFNDGVYFASTEKSNIIRGWIFGTTLDSKTQSLLIVNNATNVVIKV
CEFQFCNDPFLGVYYHKNNKSWMESEFRVYSSANNCTFEYVSQPFLMDLEGKQGNFKNLREFVFK
NIDGYFKIYSKHTPINLVRDLPQGFSALEPLVDLPIGINITRFQTLLALHRSYLTPGDSSSGWTA
GAAAYYVGYLQPRTFLLKYNENGTITDAVDCALDPLSETKCTLKSFTVEKGIYQTSNFRVQPTES
IVRFPNITNLCPFGEVFNATRFASVYAWNRKRISNCVADYSVLYNSASFSTFKCYGVSPTKLNDL
CFTNVYADSFVIRGDEVRQIAPGQTGKIADYNYKLPDDFTGCVIAWNSNNLDSKVGGNYNYLYRL
FRKSNLKPFERDISTEIYQAGSTPCNGVEGFNCYFPLQSYGFQPTNGVGYQPYRVVVLSFELLHA
PATVCGPKKSTPLVKNKCVNFNFNGLTGTGVLTESNKKFLPFQQFGRDIADITDAVRDPQTLEIL
DITPCSFGGVSVITPGTNTSNQVAVLYQDVNCTEVPVAIHADQLTPTWRVYSTGSNVFQTRAGCL
IGAEHVNNSYECDIPIGAGICASYQTQTNSPSRAGSVASQSIIAYTMSLGAENSVAYSNNSIAIP
TNFTISVTTEILPVSMTKTSVDCTMYICGDSTECSNLLLQYGSFCTQLNRALTGIAVEQDKNTQE
VFAQVKQIYKTPPIKDFGGFNFSQILPDPSKPSKRSFIEDLLFNKVTLADAGFIKQYGDCLGDIA
ARDLICAQKFNGLTVLPPLLTDEMIAQYTSALLACTITSGWTCGAGPALQIPFAMQMAYRFNGIG
VTQNVLYENQKLIANQFNSAIGKIQDSLSSTPSALGKLQDVVNQNAQALNTLVKQLSSNFGAISS
VLNDILSRLDKVEAEVQIDRLITGRLQSLQTYVTQQLIRAAEIRASANLAATKMSECVLGQSKRV
DFCGKGYHLMSFPQSAPHGVVFLHVTYVPAQEKNFTTAPAICHDGKAHFPREGVFVSNGTHWFVT
QRNFYEPQIITTDNTFVSGNCDVVIGIVNNTVYDPLQPELDSFKEELDKYFKNHTSPDVDLGDIS
GINASVVNIQKEIDRLNEVAKNLNESLIDLQELGKYEQGSGYIPEAPRDGQAYVRKDGEWVLLST
FLGRSLEVLFQGPGSLPETGGGSDYKDDDDKGGGGSGGGGSGGGGGGGGSGGGGSHHHHHH
SEQ ID NO 100: SEQ ID NO 2 + A942P + A892P + T572I +
N532P + S884C + A893C
MFVFLVLLPLVSSQCVNLTTRTQLPPAYTNSFTRGVYYPDKVFRSSVLHSTQDLFLPFFSNVTWF
HAIHVSGTNGTKRFDNPVLPFNDGVYFASTEKSNIIRGWIFGTTLDSKTQSLLIVNNATNVVIKV
CEFQFCNDPFLGVYYHKNNKSWMESEFRVYSSANNCTFEYVSQPFLMDLEGKQGNFKNLREFVFK
NIDGYFKIYSKHTPINLVRDLPQGFSALEPLVDLPIGINITRFQTLLALHRSYLTPGDSSSGWTA
GAAAYYVGYLQPRTFLLKYNENGTITDAVDCALDPLSETKCTLKSFTVEKGIYQTSNFRVQPTES
IVRFPNITNLCPFGEVFNATRFASVYAWNRKRISNCVADYSVLYNSASFSTFKCYGVSPTKLNDL
CFTNVYADSFVIRGDEVRQIAPGQTGKIADYNYKLPDDFTGCVIAWNSNNLDSKVGGNYNYLYRL
FRKSNLKPFERDISTEIYQAGSTPCNGVEGFNCYFPLQSYGFQPTNGVGYQPYRVVVLSFELLHA
PATVCGPKKSTPLVKNKCVNFNFNGLTGTGVLTESNKKFLPFQQFGRDIADITDAVRDPQTLEIL
DITPCSFGGVSVITPGTNTSNQVAVLYQDVNCTEVPVAIHADQLTPTWRVYSTGSNVFQTRAGCL
IGAEHVNNSYECDIPIGAGICASYQTQTNSPSRAGSVASQSIIAYTMSLGAENSVAYSNNSIAIP
TNFTISVTTEILPVSMTKTSVDCTMYICGDSTECSNLLLQYGSFCTQLNRALTGIAVEQDKNTQE
VFAQVKQIYKTPPIKDFGGFNFSQILPDPSKPSKRSFIEDLLFNKVTLADAGFIKQYGDCLGDIA
ARDLICAQKFNGLTVLPPLLTDEMIAQYTSALLAGTITCGWTFGAGPCLQIPFAMQMAYRFNGIG
VTQNVLYENQKLIANQFNSAIGKIQDSLSSTPSALGKLQDVVNQNAQALNTLVKQLSSNFGAISS
VLNDILSRLDKVEAEVQIDRLITGRLQSLQTYVTQQLIRAAEIRASANLAATKMSECVLGQSKRV
DFCGKGYHLMSFPQSAPHGVVFLHVTYVPAQEKNFTTAPAICHDGKAHFPREGVFVSNGTHWFVT
QRNFYEPQIITTDNTFVSGNCDVVIGIVNNTVYDPLQPELDSFKEELDKYFKNHTSPDVDLGDIS
GINASVVNIQKEIDRLNEVAKNLNESLIDLQELGKYEQGSGYIPEAPRDGQAYVRKDGEWVLLST
FLGRSLEVLFQGPGSLPETGGGSDYKDDDDKGGGGSGGGGSGGGGSGGGGSGGGGSHHHHHH
SEQ ID NO 101: SEQ ID NO 2 + A942P + D614N + T572I +
N532P + G880C + F888C
MFVFLVLLPLVSSQCVNLTTRTQLPPAYTNSFTRGVYYPDKVFRSSVLHSTQDLFLPFFSNVTWF
HAIHVSGTNGTKRFDNPVLPFNDGVYFASTEKSNIIRGWIFGTTLDSKTQSLLIVNNATNVVIKV
CEFQFCNDPFLGVYYHKNNKSWMESEFRVYSSANNCTFEYVSQPFLMDLEGKQGNFKNLREFVFK
NIDGYFKIYSKHTPINLVRDLPQGFSALEPLVDLPIGINITRFQTLLALHRSYLTPGDSSSGWTA
GAAAYYVGYLQPRTFLLKYNENGTITDAVDCALDPLSETKCTLKSFTVEKGIYQTSNFRVQPTES
IVRFPNITNLCPFGEVFNATRFASVYAWNRKRISNCVADYSVLYNSASFSTFKCYGVSPTKLNDL
CFTNVYADSFVIRGDEVRQIAPGQTGKIADYNYKLPDDFTGCVIAWNSNNLDSKVGGNYNYLYRL
FRKSNLKPFERDISTEIYQAGSTPCNGVEGFNCYFPLQSYGFQPTNGVGYQPYRVVVLSFELLHA
PATVCGPKKSTPLVKNKCVNFNFNGLTGTGVLTESNKKFLPFQQFGRDIADITDAVRDPQTLEIL
DITPCSFGGVSVITPGTNTSNQVAVLYQNVNCTEVPVAIHADQLTPTWRVYSTGSNVFQTRAGCL
IGAEHVNNSYECDIPIGAGICASYQTQTNSPSRAGSVASQSIIAYTMSLGAENSVAYSNNSIAIP
TNFTISVTTEILPVSMTKTSVDCTMYICGDSTECSNLLLQYGSFCTQLNRALTGIAVEQDKNTQE
VFAQVKQIYKTPPIKDFGGFNFSQILPDPSKPSKRSFIEDLLFNKVTLADAGFIKQYGDCLGDIA
ARDLICAQKFNGLTVLPPLLTDEMIAQYTSALLACTITSGWTCGAGAALQIPFAMQMAYRFNGIG
VTQNVLYENQKLIANQFNSAIGKIQDSLSSTPSALGKLQDVVNQNAQALNTLVKQLSSNFGAISS
VLNDILSRLDKVEAEVQIDRLITGRLQSLQTYVTQQLIRAAEIRASANLAATKMSECVLGQSKRV
DFCGKGYHLMSFPQSAPHGVVFLHVTYVPAQEKNFTTAPAICHDGKAHFPREGVFVSNGTHWFVT
QRNFYEPQIITTDNTFVSGNCDVVIGIVNNTVYDPLQPELDSFKEELDKYFKNHTSPDVDLGDIS
GINASVVNIQKEIDRLNEVAKNLNESLIDLQELGKYEQGSGYIPEAPRDGQAYVRKDGEWVLLST
FLGRSLEVLFQGPGSLPETGGGSDYKDDDDKGGGGSGGGGSGGGGSGGGGSGGGGSHHHHHH
SEQ ID NO 102: SEQ ID NO 2 + A942P + D614N + T572I +
N532P + S884C + A893C
MFVFLVLLPLVSSQCVNLTTRTQLPPAYTNSFTRGVYYPDKVFRSSVLHSTQDLFLPFFSNVTWF
HAIHVSGTNGTKRFDNPVLPFNDGVYFASTEKSNIIRGWIFGTTLDSKTQSLLIVNNATNVVIKV
CEFQFCNDPFLGVYYHKNNKSWMESEFRVYSSANNCTFEYVSQPFLMDLEGKQGNFKNLREFVFK
NIDGYFKIYSKHTPINLVRDLPQGFSALEPLVDLPIGINITRFQTLLALHRSYLTPGDSSSGWTA
GAAAYYVGYLQPRTFLLKYNENGTITDAVDCALDPLSETKCTLKSFTVEKGIYQTSNFRVQPTES
IVRFPNITNLCPFGEVFNATRFASVYAWNRKRISNCVADYSVLYNSASFSTFKCYGVSPTKLNDL
CFTNVYADSFVIRGDEVRQIAPGQTGKIADYNYKLPDDFTGCVIAWNSNNLDSKVGGNYNYLYRL
FRKSNLKPFERDISTEIYQAGSTPCNGVEGFNCYFPLQSYGFQPTNGVGYQPYRVVVLSFELLHA
PATVCGPKKSTPLVKNKCVNFNFNGLTGTGVLTESNKKFLPFQQFGRDIADITDAVRDPQTLEIL
DITPCSFGGVSVITPGTNTSNQVAVLYQNVNCTEVPVAIHADQLTPTWRVYSTGSNVFQTRAGCL
IGAEHVNNSYECDIPIGAGICASYQTQTNSPSRAGSVASQSIIAYTMSLGAENSVAYSNNSIAIP
TNFTISVTTEILPVSMTKTSVDCTMYICGDSTECSNLLLQYGSFCTQLNRALTGIAVEQDKNTQE
VFAQVKQIYKTPPIKDFGGFNFSQILPDPSKPSKRSFIEDLLFNKVTLADAGFIKQYGDCLGDIA
ARDLICAQKFNGLTVLPPLLTDEMIAQYTSALLAGTITCGWTFGAGACLQIPFAMQMAYRFNGIG
VTQNVLYENQKLIANQFNSAIGKIQDSLSSTPSALGKLQDVVNQNAQALNTLVKQLSSNFGAISS
VLNDILSRLDKVEAEVQIDRLITGRLQSLQTYVTQQLIRAAEIRASANLAATKMSECVLGQSKRV
DFCGKGYHLMSFPQSAPHGVVFLHVTYVPAQEKNFTTAPAICHDGKAHFPREGVFVSNGTHWFVT
QRNFYEPQIITTDNTFVSGNCDVVIGIVNNTVYDPLQPELDSFKEELDKYFKNHTSPDVDLGDIS
GINASVVNIQKEIDRLNEVAKNLNESLIDLQELGKYEQGSGYIPEAPRDGQAYVRKDGEWVLLST
FLGRSLEVLFQGPGSLPETGGGSDYKDDDDKGGGGSGGGGSGGGGSGGGGSGGGGSHHHHHH
SEQ ID NO 103: SEQ ID NO 2 + A892P + D614N + T572I +
N532P + G880C + F888C
MFVFLVLLPLVSSQCVNLTTRTQLPPAYTNSFTRGVYYPDKVFRSSVLHSTQDLFLPFFSNVTWF
HAIHVSGTNGTKRFDNPVLPFNDGVYFASTEKSNIIRGWIFGTTLDSKTQSLLIVNNATNVVIKV
CEFQFCNDPFLGVYYHKNNKSWMESEFRVYSSANNCTFEYVSQPFLMDLEGKQGNFKNLREFVFK
NIDGYFKIYSKHTPINLVRDLPQGFSALEPLVDLPIGINITRFQTLLALHRSYLTPGDSSSGWTA
GAAAYYVGYLQPRTFLLKYNENGTITDAVDCALDPLSETKCTLKSFTVEKGIYQTSNFRVQPTES
IVRFPNITNLCPFGEVFNATRFASVYAWNRKRISNCVADYSVLYNSASFSTFKCYGVSPTKLNDL
CFTNVYADSFVIRGDEVRQIAPGQTGKIADYNYKLPDDFTGCVIAWNSNNLDSKVGGNYNYLYRL
FRKSNLKPFERDISTEIYQAGSTPCNGVEGFNCYFPLQSYGFQPTNGVGYQPYRVVVLSFELLHA
PATVCGPKKSTPLVKNKCVNFNFNGLTGTGVLTESNKKFLPFQQFGRDIADITDAVRDPQTLEIL
DITPCSFGGVSVITPGTNTSNQVAVLYQNVNCTEVPVAIHADQLTPTWRVYSTGSNVFQTRAGCL
IGAEHVNNSYECDIPIGAGICASYQTQTNSPSRAGSVASQSIIAYTMSLGAENSVAYSNNSIAIP
TNFTISVTTEILPVSMTKTSVDCTMYICGDSTECSNLLLQYGSFCTQLNRALTGIAVEQDKNTQE
VFAQVKQIYKTPPIKDFGGFNFSQILPDPSKPSKRSFIEDLLFNKVTLADAGFIKQYGDCLGDIA
ARDLICAQKFNGLTVLPPLLTDEMIAQYTSALLACTITSGWTCGAGPALQIPFAMQMAYRFNGIG
VTQNVLYENQKLIANQFNSAIGKIQDSLSSTASALGKLQDVVNQNAQALNTLVKQLSSNFGAISS
VLNDILSRLDKVEAEVQIDRLITGRLQSLQTYVTQQLIRAAEIRASANLAATKMSECVLGQSKRV
DFCGKGYHLMSFPQSAPHGVVFLHVTYVPAQEKNFTTAPAICHDGKAHFPREGVFVSNGTHWFVT
QRNFYEPQIITTDNTFVSGNCDVVIGIVNNTVYDPLQPELDSFKEELDKYFKNHTSPDVDLGDIS
GINASVVNIQKEIDRLNEVAKNLNESLIDLQELGKYEQGSGYIPEAPRDGQAYVRKDGEWVLLST
FLGRSLEVLFQGPGSLPETGGGSDYKDDDDKGGGGSGGGGSGGGGSGGGGSGGGGSHHHHHH
SEQ ID NO 104: SEQ ID NO 2 + A892P + D614N + T572I +
N532P + S884C + A893C
MFVFLVLLPLVSSQCVNLTTRTQLPPAYTNSFTRGVYYPDKVFRSSVLHSTQDLFLPFFSNVTWF
HAIHVSGTNGTKRFDNPVLPFNDGVYFASTEKSNIIRGWIFGTTLDSKTQSLLIVNNATNVVIKV
CEFQFCNDPFLGVYYHKNNKSWMESEFRVYSSANNCTFEYVSQPFLMDLEGKQGNFKNLREFVFK
NIDGYFKIYSKHTPINLVRDLPQGFSALEPLVDLPIGINITRFQTLLALHRSYLTPGDSSSGWTA
GAAAYYVGYLQPRTFLLKYNENGTITDAVDCALDPLSETKCTLKSFTVEKGIYQTSNFRVQPTES
IVRFPNITNLCPFGEVFNATRFASVYAWNRKRISNCVADYSVLYNSASFSTFKCYGVSPTKLNDL
CFTNVYADSFVIRGDEVRQIAPGQTGKIADYNYKLPDDFTGCVIAWNSNNLDSKVGGNYNYLYRL
FRKSNLKPFERDISTEIYQAGSTPCNGVEGFNCYFPLQSYGFQPTNGVGYQPYRVVVLSFELLHA
PATVCGPKKSTPLVKNKCVNFNFNGLTGTGVLTESNKKFLPFQQFGRDIADITDAVRDPQTLEIL
DITPCSFGGVSVITPGTNTSNQVAVLYQNVNCTEVPVAIHADQLTPTWRVYSTGSNVFQTRAGCL
IGAEHVNNSYECDIPIGAGICASYQTQTNSPSRAGSVASQSIIAYTMSLGAENSVAYSNNSIAIP
TNFTISVTTEILPVSMTKTSVDCTMYICGDSTECSNLLLQYGSFCTQLNRALTGIAVEQDKNTQE
VFAQVKQIYKTPPIKDFGGFNFSQILPDPSKPSKRSFIEDLLFNKVTLADAGFIKQYGDCLGDIA
ARDLICAQKFNGLTVLPPLLTDEMIAQYTSALLAGTITCGWTFGAGPCLQIPFAMQMAYRFNGIG
VTQNVLYENQKLIANQFNSAIGKIQDSLSSTASALGKLQDVVNQNAQALNTLVKQLSSNFGAISS
VLNDILSRLDKVEAEVQIDRLITGRLQSLQTYVTQQLIRAAEIRASANLAATKMSECVLGQSKRV
DFCGKGYHLMSFPQSAPHGVVFLHVTYVPAQEKNFTTAPAICHDGKAHFPREGVFVSNGTHWFVT
QRNFYEPQIITTDNTFVSGNCDVVIGIVNNTVYDPLQPELDSFKEELDKYFKNHTSPDVDLGDIS
GINASVVNIQKEIDRLNEVAKNLNESLIDLQELGKYEQGSGYIPEAPRDGQAYVRKDGEWVLLST
FLGRSLEVLFQGPGSLPETGGGSDYKDDDDKGGGGSGGGGGGGGSGGGGSGGGGSHHHHHH
SEQ ID NO 105: SEQ ID NO 2 + A942P + A892P + D614N + T572I +
N532P + G880C + F888C
MFVFLVLLPLVSSQCVNLTTRTQLPPAYTNSFTRGVYYPDKVFRSSVLHSTQDLFLPFFSNVTWF
HAIHVSGTNGTKRFDNPVLPFNDGVYFASTEKSNIIRGWIFGTTLDSKTQSLLIVNNATNVVIKV
CEFQFCNDPFLGVYYHKNNKSWMESEFRVYSSANNCTFEYVSQPFLMDLEGKQGNFKNLREFVFK
NIDGYFKIYSKHTPINLVRDLPQGFSALEPLVDLPIGINITRFQTLLALHRSYLTPGDSSSGWTA
GAAAYYVGYLQPRTFLLKYNENGTITDAVDCALDPLSETKCTLKSFTVEKGIYQTSNFRVQPTES
IVRFPNITNLCPFGEVFNATRFASVYAWNRKRISNCVADYSVLYNSASFSTFKCYGVSPTKLNDL
CFTNVYADSFVIRGDEVRQIAPGQTGKIADYNYKLPDDFTGCVIAWNSNNLDSKVGGNYNYLYRL
FRKSNLKPFERDISTEIYQAGSTPCNGVEGFNCYFPLQSYGFQPTNGVGYQPYRVVVLSFELLHA
PATVCGPKKSTPLVKNKCVNFNFNGLTGTGVLTESNKKFLPFQQFGRDIADITDAVRDPQTLEIL
DITPCSFGGVSVITPGTNTSNQVAVLYQNVNCTEVPVAIHADQLTPTWRVYSTGSNVFQTRAGCL
IGAEHVNNSYECDIPIGAGICASYQTQTNSPSRAGSVASQSIIAYTMSLGAENSVAYSNNSIAIP
TNFTISVTTEILPVSMTKTSVDCTMYICGDSTECSNLLLQYGSFCTQLNRALTGIAVEQDKNTQE
VFAQVKQIYKTPPIKDFGGFNFSQILPDPSKPSKRSFIEDLLFNKVTLADAGFIKQYGDCLGDIA
ARDLICAQKFNGLTVLPPLLTDEMIAQYTSALLACTITSGWTCGAGPALQIPFAMQMAYRFNGIG
VTQNVLYENQKLIANQFNSAIGKIQDSLSSTPSALGKLQDVVNQNAQALNTLVKQLSSNFGAISS
VLNDILSRLDKVEAEVQIDRLITGRLQSLQTYVTQQLIRAAEIRASANLAATKMSECVLGQSKRV
DFCGKGYHLMSFPQSAPHGVVFLHVTYVPAQEKNFTTAPAICHDGKAHFPREGVFVSNGTHWFVT
QRNFYEPQIITTDNTFVSGNCDVVIGIVNNTVYDPLQPELDSFKEELDKYFKNHTSPDVDLGDIS
GINASVVNIQKEIDRLNEVAKNLNESLIDLQELGKYEQGSGYIPEAPRDGQAYVRKDGEWVLLST
FLGRSLEVLFQGPGSLPETGGGSDYKDDDDKGGGGSGGGGSGGGGSGGGGSGGGGSHHHHHH
SEQ ID NO 106: SEQ ID NO 2 + A942P + A892P + D614N + T572I +
N532P + S884C + A893C
MFVFLVLLPLVSSQCVNLTTRTQLPPAYTNSFTRGVYYPDKVFRSSVLHSTQDLFLPFFSNVTWF
HAIHVSGTNGTKRFDNPVLPFNDGVYFASTEKSNIIRGWIFGTTLDSKTQSLLIVNNATNVVIKV
CEFQFCNDPFLGVYYHKNNKSWMESEFRVYSSANNCTFEYVSQPFLMDLEGKQGNFKNLREFVFK
NIDGYFKIYSKHTPINLVRDLPQGFSALEPLVDLPIGINITRFQTLLALHRSYLTPGDSSSGWTA
GAAAYYVGYLQPRTFLLKYNENGTITDAVDCALDPLSETKCTLKSFTVEKGIYQTSNFRVQPTES
IVRFPNITNLCPFGEVFNATRFASVYAWNRKRISNCVADYSVLYNSASFSTFKCYGVSPTKLNDL
CFTNVYADSFVIRGDEVRQIAPGQTGKIADYNYKLPDDFTGCVIAWNSNNLDSKVGGNYNYLYRL
FRKSNLKPFERDISTEIYQAGSTPCNGVEGFNCYFPLQSYGFQPTNGVGYQPYRVVVLSFELLHA
PATVCGPKKSTPLVKNKCVNFNFNGLTGTGVLTESNKKFLPFQQFGRDIADITDAVRDPQTLEIL
DITPCSFGGVSVITPGTNTSNQVAVLYQNVNCTEVPVAIHADQLTPTWRVYSTGSNVFQTRAGCL
IGAEHVNNSYECDIPIGAGICASYQTQTNSPSRAGSVASQSIIAYTMSLGAENSVAYSNNSIAIP
TNFTISVTTEILPVSMTKTSVDCTMYICGDSTECSNLLLQYGSFCTQLNRALTGIAVEQDKNTQE
VFAQVKQIYKTPPIKDFGGFNFSQILPDPSKPSKRSFIEDLLFNKVTLADAGFIKQYGDCLGDIA
ARDLICAQKFNGLTVLPPLLTDEMIAQYTSALLAGTITCGWTFGAGPCLQIPFAMQMAYRFNGIG
VTQNVLYENQKLIANQFNSAIGKIQDSLSSTPSALGKLQDVVNQNAQALNTLVKQLSSNFGAISS
VLNDILSRLDKVEAEVQIDRLITGRLQSLQTYVTQQLIRAAEIRASANLAATKMSECVLGQSKRV
DFCGKGYHLMSFPQSAPHGVVFLHVTYVPAQEKNFTTAPAICHDGKAHFPREGVFVSNGTHWFVT
QRNFYEPQIITTDNTFVSGNCDVVIGIVNNTVYDPLQPELDSFKEELDKYFKNHTSPDVDLGDIS
GINASVVNIQKEIDRLNEVAKNLNESLIDLQELGKYEQGSGYIPEAPRDGQAYVRKDGEWVLLST
FLGRSLEVLFQGPGSLPETGGGSDYKDDDDKGGGGSGGGGSGGGGSGGGGSGGGGSHHHHHH
SEQ ID NO 107: SEQ ID NO 3 + A942P + A892P
MFVFLVLLPLVSSQCVNLTTRTQLPPAYTNSFTRGVYYPDKVFRSSVLHSTQDLFLPFFSNVTWF
HAIHVSGTNGTKRFDNPVLPFNDGVYFASTEKSNIIRGWIFGTTLDSKTQSLLIVNNATNVVIKV
CEFQFCNDPFLGVYYHKNNKSWMESEFRVYSSANNCTFEYVSQPFLMDLEGKQGNFKNLREFVFK
NIDGYFKIYSKHTPINLVRDLPQGFSALEPLVDLPIGINITRFQTLLALHRSYLTPGDSSSGWTA
GAAAYYVGYLQPRTFLLKYNENGTITDAVDCALDPLSETKCTLKSFTVEKGIYQTSNFRVQPTES
IVRFPNITNLCPFGEVFNATRFASVYAWNRKRISNCVADYSVLYNSASFSTFKCYGVSPTKLNDL
CFTNVYADSFVIRGDEVRQIAPGQTGKIADYNYKLPDDFTGCVIAWNSNNLDSKVGGNYNYLYRL
FRKSNLKPFERDISTEIYQAGSTPCNGVEGFNCYFPLQSYGFQPTNGVGYQPYRVVVLSFELLHA
PATVCGPKKSTNLVKNKCVNFNFNGLTGTGVLTESNKKFLPFQQFGRDIADTTDAVRDPQTLEIL
DITPCSFGGVSVITPGTNTSNQVAVLYQDVNCTEVPVAIHADQLTPTWRVYSTGSNVFQTRAGCL
IGAEHVNNSYECDIPIGAGICASYQTQTNSPSRAGSVASQSIIAYTMSLGAENSVAYSNNSIAIP
TNFTISVTTEILPVSMTKTSVDCTMYICGDSTECSNLLLQYGSFCTQLNRALTGIAVEQDKNTQE
VFAQVKQIYKTPPIKDFGGFNFSQILPDPSKPSKRSFIEDLLFNKVTLADAGFIKQYGDCLGDIA
ARDLICAQKFNGLTVLPPLLTDEMIAQYTSALLAGTITSGWTFGAGPALQIPFAMQMAYRFNGIG
VTQNVLYENQKLIANQFNSAIGKIQDSLSSTPSALGKLQDVVNQNAQALNTLVKQLSSNFGAISS
VLNDILSRLDPPEAEVQIDRLITGRLQSLQTYVTQQLIRAAEIRASANLAATKMSECVLGQSKRV
DFCGKGYHLMSFPQSAPHGVVFLHVTYVPAQEKNFTTAPAICHDGKAHFPREGVFVSNGTHWFVT
QRNFYEPQIITTDNTFVSGNCDVVIGIVNNTVYDPLQPELDSFKEELDKYFKNHTSPDVDLGDIS
GINASVVNIQKEIDRLNEVAKNLNESLIDLQELGKYEQGSGYIPEAPRDGQAYVRKDGEWVLLST
FLGRSLEVLFQGPGSLPETGGGSDYKDDDDKGGGGSGGGGSGGGGSGGGGSGGGGSHHHHHH
SEQ ID NO 108: SEQ ID NO 3 + A942P + D614N
MFVFLVLLPLVSSQCVNLTTRTQLPPAYTNSFTRGVYYPDKVFRSSVLHSTQDLFLPFFSNVTWF
HAIHVSGTNGTKRFDNPVLPFNDGVYFASTEKSNIIRGWIFGTTLDSKTQSLLIVNNATNVVIKV
CEFQFCNDPFLGVYYHKNNKSWMESEFRVYSSANNCTFEYVSQPFLMDLEGKQGNFKNLREFVFK
NIDGYFKIYSKHTPINLVRDLPQGFSALEPLVDLPIGINITRFQTLLALHRSYLTPGDSSSGWTA
GAAAYYVGYLQPRTFLLKYNENGTITDAVDCALDPLSETKCTLKSFTVEKGIYQTSNFRVQPTES
IVRFPNITNLCPFGEVFNATRFASVYAWNRKRISNCVADYSVLYNSASFSTFKCYGVSPTKLNDL
CFTNVYADSFVIRGDEVRQIAPGQTGKIADYNYKLPDDFTGCVIAWNSNNLDSKVGGNYNYLYRL
FRKSNLKPFERDISTEIYQAGSTPCNGVEGFNCYFPLQSYGFQPTNGVGYQPYRVVVLSFELLHA
PATVCGPKKSTNLVKNKCVNFNFNGLTGTGVLTESNKKFLPFQQFGRDIADTTDAVRDPQTLEIL
DITPCSFGGVSVITPGTNTSNQVAVLYQNVNCTEVPVAIHADQLTPTWRVYSTGSNVFQTRAGCL
IGAEHVNNSYECDIPIGAGICASYQTQTNSPSRAGSVASQSIIAYTMSLGAENSVAYSNNSIAIP
TNFTISVTTEILPVSMTKTSVDCTMYICGDSTECSNLLLQYGSFCTQLNRALTGIAVEQDKNTQE
VFAQVKQIYKTPPIKDFGGFNFSQILPDPSKPSKRSFIEDLLFNKVTLADAGFIKQYGDCLGDIA
ARDLICAQKFNGLTVLPPLLTDEMIAQYTSALLAGTITSGWTFGAGAALQIPFAMQMAYRFNGIG
VTQNVLYENQKLIANQFNSAIGKIQDSLSSTPSALGKLQDVVNQNAQALNTLVKQLSSNFGAISS
VLNDILSRLDPPEAEVQIDRLITGRLQSLQTYVTQQLIRAAEIRASANLAATKMSECVLGQSKRV
DFCGKGYHLMSFPQSAPHGVVFLHVTYVPAQEKNFTTAPAICHDGKAHFPREGVFVSNGTHWFVT
QRNFYEPQIITTDNTFVSGNCDVVIGIVNNTVYDPLQPELDSFKEELDKYFKNHTSPDVDLGDIS
GINASVVNIQKEIDRLNEVAKNLNESLIDLQELGKYEQGSGYIPEAPRDGQAYVRKDGEWVLLST
FLGRSLEVLFQGPGSLPETGGGSDYKDDDDKGGGGSGGGGSGGGGSGGGGSGGGGSHHHHHH
SEQ ID NO 109: SEQ ID NO 3 + A942P + T572I
MFVFLVLLPLVSSQCVNLTTRTQLPPAYTNSFTRGVYYPDKVFRSSVLHSTQDLFLPFFSNVTWF
HAIHVSGTNGTKRFDNPVLPFNDGVYFASTEKSNIIRGWIFGTTLDSKTQSLLIVNNATNVVIKV
CEFQFCNDPFLGVYYHKNNKSWMESEFRVYSSANNCTFEYVSQPFLMDLEGKQGNFKNLREFVFK
NIDGYFKIYSKHTPINLVRDLPQGFSALEPLVDLPIGINITRFQTLLALHRSYLTPGDSSSGWTA
GAAAYYVGYLQPRTFLLKYNENGTITDAVDCALDPLSETKCTLKSFTVEKGIYQTSNFRVQPTES
IVRFPNITNLCPFGEVFNATRFASVYAWNRKRISNCVADYSVLYNSASFSTFKCYGVSPTKLNDL
CFTNVYADSFVIRGDEVRQIAPGQTGKIADYNYKLPDDFTGCVIAWNSNNLDSKVGGNYNYLYRL
FRKSNLKPFERDISTEIYQAGSTPCNGVEGFNCYFPLQSYGFQPTNGVGYQPYRVVVLSFELLHA
PATVCGPKKSTNLVKNKCVNFNFNGLTGTGVLTESNKKFLPFQQFGRDIADITDAVRDPQTLEIL
DITPCSFGGVSVITPGTNTSNQVAVLYQDVNCTEVPVAIHADQLTPTWRVYSTGSNVFQTRAGCL
IGAEHVNNSYECDIPIGAGICASYQTQTNSPSRAGSVASQSIIAYTMSLGAENSVAYSNNSIAIP
TNFTISVTTEILPVSMTKTSVDCTMYICGDSTECSNLLLQYGSFCTQLNRALTGIAVEQDKNTQE
VFAQVKQIYKTPPIKDFGGFNFSQILPDPSKPSKRSFIEDLLFNKVTLADAGFIKQYGDCLGDIA
ARDLICAQKFNGLTVLPPLLTDEMIAQYTSALLAGTITSGWTFGAGAALQIPFAMQMAYRFNGIG
VTQNVLYENQKLIANQFNSAIGKIQDSLSSTPSALGKLQDVVNQNAQALNTLVKQLSSNFGAISS
VLNDILSRLDPPEAEVQIDRLITGRLQSLQTYVTQQLIRAAEIRASANLAATKMSECVLGQSKRV
DFCGKGYHLMSFPQSAPHGVVFLHVTYVPAQEKNFTTAPAICHDGKAHFPREGVFVSNGTHWFVT
QRNFYEPQIITTDNTFVSGNCDVVIGIVNNTVYDPLQPELDSFKEELDKYFKNHTSPDVDLGDIS
GINASVVNIQKEIDRLNEVAKNLNESLIDLQELGKYEQGSGYIPEAPRDGQAYVRKDGEWVLLST
FLGRSLEVLFQGPGSLPETGGGSDYKDDDDKGGGGSGGGGSGGGGSGGGGSGGGGSHHHHHH
SEQ ID NO 110: SEQ ID NO 3 + A942P + N532P
MFVFLVLLPLVSSQCVNLTTRTQLPPAYTNSFTRGVYYPDKVFRSSVLHSTQDLFLPFFSNVTWF
HAIHVSGTNGTKRFDNPVLPFNDGVYFASTEKSNIIRGWIFGTTLDSKTQSLLIVNNATNVVIKV
CEFQFCNDPFLGVYYHKNNKSWMESEFRVYSSANNCTFEYVSQPFLMDLEGKQGNFKNLREFVFK
NIDGYFKIYSKHTPINLVRDLPQGFSALEPLVDLPIGINITRFQTLLALHRSYLTPGDSSSGWTA
GAAAYYVGYLQPRTFLLKYNENGTITDAVDCALDPLSETKCTLKSFTVEKGIYQTSNFRVQPTES
IVRFPNITNLCPFGEVFNATRFASVYAWNRKRISNCVADYSVLYNSASFSTFKCYGVSPTKLNDL
CFTNVYADSFVIRGDEVRQIAPGQTGKIADYNYKLPDDFTGCVIAWNSNNLDSKVGGNYNYLYRL
FRKSNLKPFERDISTEIYQAGSTPCNGVEGFNCYFPLQSYGFQPTNGVGYQPYRVVVLSFELLHA
PATVCGPKKSTPLVKNKCVNFNFNGLTGTGVLTESNKKFLPFQQFGRDIADTTDAVRDPQTLEIL
DITPCSFGGVSVITPGTNTSNQVAVLYQDVNCTEVPVAIHADQLTPTWRVYSTGSNVFQTRAGCL
IGAEHVNNSYECDIPIGAGICASYQTQTNSPSRAGSVASQSIIAYTMSLGAENSVAYSNNSIAIP
TNFTISVTTEILPVSMTKTSVDCTMYICGDSTECSNLLLQYGSFCTQLNRALTGIAVEQDKNTQE
VFAQVKQIYKTPPIKDFGGFNFSQILPDPSKPSKRSFIEDLLFNKVTLADAGFIKQYGDCLGDIA
ARDLICAQKFNGLTVLPPLLTDEMIAQYTSALLAGTITSGWTFGAGAALQIPFAMQMAYRFNGIG
VTQNVLYENQKLIANQFNSAIGKIQDSLSSTPSALGKLQDVVNQNAQALNTLVKQLSSNFGAISS
VLNDILSRLDPPEAEVQIDRLITGRLQSLQTYVTQQLIRAAEIRASANLAATKMSECVLGQSKRV
DFCGKGYHLMSFPQSAPHGVVFLHVTYVPAQEKNFTTAPAICHDGKAHFPREGVFVSNGTHWFVT
QRNFYEPQIITTDNTFVSGNCDVVIGIVNNTVYDPLQPELDSFKEELDKYFKNHTSPDVDLGDIS
GINASVVNIQKEIDRLNEVAKNLNESLIDLQELGKYEQGSGYIPEAPRDGQAYVRKDGEWVLLST
FLGRSLEVLFQGPGSLPETGGGSDYKDDDDKGGGGSGGGGSGGGGSGGGGSGGGGSHHHHHH
SEQ ID NO 111: SEQ ID NO 3 + A942P + G880C + F888C
MFVFLVLLPLVSSQCVNLTTRTQLPPAYTNSFTRGVYYPDKVFRSSVLHSTQDLFLPFFSNVTWF
HAIHVSGTNGTKRFDNPVLPFNDGVYFASTEKSNIIRGWIFGTTLDSKTQSLLIVNNATNVVIKV
CEFQFCNDPFLGVYYHKNNKSWMESEFRVYSSANNCTFEYVSQPFLMDLEGKQGNFKNLREFVFK
NIDGYFKIYSKHTPINLVRDLPQGFSALEPLVDLPIGINITRFQTLLALHRSYLTPGDSSSGWTA
GAAAYYVGYLQPRTFLLKYNENGTITDAVDCALDPLSETKCTLKSFTVEKGIYQTSNFRVQPTES
IVRFPNITNLCPFGEVFNATRFASVYAWNRKRISNCVADYSVLYNSASFSTFKCYGVSPTKLNDL
CFTNVYADSFVIRGDEVRQIAPGQTGKIADYNYKLPDDFTGCVIAWNSNNLDSKVGGNYNYLYRL
FRKSNLKPFERDISTEIYQAGSTPCNGVEGFNCYFPLQSYGFQPTNGVGYQPYRVVVLSFELLHA
PATVCGPKKSTNLVKNKCVNFNFNGLTGTGVLTESNKKFLPFQQFGRDIADTTDAVRDPQTLEIL
DITPCSFGGVSVITPGTNTSNQVAVLYQDVNCTEVPVAIHADQLTPTWRVYSTGSNVFQTRAGCL
IGAEHVNNSYECDIPIGAGICASYQTQTNSPSRAGSVASQSIIAYTMSLGAENSVAYSNNSIAIP
TNFTISVTTEILPVSMTKTSVDCTMYICGDSTECSNLLLQYGSFCTQLNRALTGIAVEQDKNTQE
VFAQVKQIYKTPPIKDFGGFNFSQILPDPSKPSKRSFIEDLLFNKVTLADAGFIKQYGDCLGDIA
ARDLICAQKFNGLTVLPPLLTDEMIAQYTSALLACTITSGWTCGAGAALQIPFAMQMAYRFNGIG
VTQNVLYENQKLIANQFNSAIGKIQDSLSSTPSALGKLQDVVNQNAQALNTLVKQLSSNFGAISS
VLNDILSRLDPPEAEVQIDRLITGRLQSLQTYVTQQLIRAAEIRASANLAATKMSECVLGQSKRV
DFCGKGYHLMSFPQSAPHGVVFLHVTYVPAQEKNFTTAPAICHDGKAHFPREGVFVSNGTHWFVT
QRNFYEPQIITTDNTFVSGNCDVVIGIVNNTVYDPLQPELDSFKEELDKYFKNHTSPDVDLGDIS
GINASVVNIQKEIDRLNEVAKNLNESLIDLQELGKYEQGSGYIPEAPRDGQAYVRKDGEWVLLST
FLGRSLEVLFQGPGSLPETGGGSDYKDDDDKGGGGSGGGGSGGGGSGGGGSGGGGSHHHHHH
SEQ ID NO 112: SEQ ID NO 3 + A942P + S884C + A893C
MFVFLVLLPLVSSQCVNLTTRTQLPPAYTNSFTRGVYYPDKVFRSSVLHSTQDLFLPFFSNVTWF
HAIHVSGTNGTKRFDNPVLPFNDGVYFASTEKSNIIRGWIFGTTLDSKTQSLLIVNNATNVVIKV
CEFQFCNDPFLGVYYHKNNKSWMESEFRVYSSANNCTFEYVSQPFLMDLEGKQGNFKNLREFVFK
NIDGYFKIYSKHTPINLVRDLPQGFSALEPLVDLPIGINITRFQTLLALHRSYLTPGDSSSGWTA
GAAAYYVGYLQPRTFLLKYNENGTITDAVDCALDPLSETKCTLKSFTVEKGIYQTSNFRVQPTES
IVRFPNITNLCPFGEVFNATRFASVYAWNRKRISNCVADYSVLYNSASFSTFKCYGVSPTKLNDL
CFTNVYADSFVIRGDEVRQIAPGQTGKIADYNYKLPDDFTGCVIAWNSNNLDSKVGGNYNYLYRL
FRKSNLKPFERDISTEIYQAGSTPCNGVEGFNCYFPLQSYGFQPTNGVGYQPYRVVVLSFELLHA
PATVCGPKKSTNLVKNKCVNFNFNGLTGTGVLTESNKKFLPFQQFGRDIADTTDAVRDPQTLEIL
DITPCSFGGVSVITPGTNTSNQVAVLYQDVNCTEVPVAIHADQLTPTWRVYSTGSNVFQTRAGCL
IGAEHVNNSYECDIPIGAGICASYQTQTNSPSRAGSVASQSIIAYTMSLGAENSVAYSNNSIAIP
TNFTISVTTEILPVSMTKTSVDCTMYICGDSTECSNLLLQYGSFCTQLNRALTGIAVEQDKNTQE
VFAQVKQIYKTPPIKDFGGFNFSQILPDPSKPSKRSFIEDLLFNKVTLADAGFIKQYGDCLGDIA
ARDLICAQKFNGLTVLPPLLTDEMIAQYTSALLAGTITCGWTFGAGACLQIPFAMQMAYRFNGIG
VTQNVLYENQKLIANQFNSAIGKIQDSLSSTPSALGKLQDVVNQNAQALNTLVKQLSSNFGAISS
VLNDILSRLDPPEAEVQIDRLITGRLQSLQTYVTQQLIRAAEIRASANLAATKMSECVLGQSKRV
DFCGKGYHLMSFPQSAPHGVVFLHVTYVPAQEKNFTTAPAICHDGKAHFPREGVFVSNGTHWFVT
QRNFYEPQIITTDNTFVSGNCDVVIGIVNNTVYDPLQPELDSFKEELDKYFKNHTSPDVDLGDIS
GINASVVNIQKEIDRLNEVAKNLNESLIDLQELGKYEQGSGYIPEAPRDGQAYVRKDGEWVLLST
FLGRSLEVLFQGPGSLPETGGGSDYKDDDDKGGGGSGGGGSGGGGSGGGGSGGGGSHHHHHH
SEQ ID NO 113: SEQ ID NO 3 + A892P + D614N
MFVFLVLLPLVSSQCVNLTTRTQLPPAYTNSFTRGVYYPDKVFRSSVLHSTQDLFLPFFSNVTWF
HAIHVSGTNGTKRFDNPVLPFNDGVYFASTEKSNIIRGWIFGTTLDSKTQSLLIVNNATNVVIKV
CEFQFCNDPFLGVYYHKNNKSWMESEFRVYSSANNCTFEYVSQPFLMDLEGKQGNFKNLREFVFK
NIDGYFKIYSKHTPINLVRDLPQGFSALEPLVDLPIGINITRFQTLLALHRSYLTPGDSSSGWTA
GAAAYYVGYLQPRTFLLKYNENGTITDAVDCALDPLSETKCTLKSFTVEKGIYQTSNFRVQPTES
IVRFPNITNLCPFGEVFNATRFASVYAWNRKRISNCVADYSVLYNSASFSTFKCYGVSPTKLNDL
CFTNVYADSFVIRGDEVRQIAPGQTGKIADYNYKLPDDFTGCVIAWNSNNLDSKVGGNYNYLYRL
FRKSNLKPFERDISTEIYQAGSTPCNGVEGFNCYFPLQSYGFQPTNGVGYQPYRVVVLSFELLHA
PATVCGPKKSTNLVKNKCVNFNFNGLTGTGVLTESNKKFLPFQQFGRDIADTTDAVRDPQTLEIL
DITPCSFGGVSVITPGTNTSNQVAVLYQNVNCTEVPVAIHADQLTPTWRVYSTGSNVFQTRAGCL
IGAEHVNNSYECDIPIGAGICASYQTQTNSPSRAGSVASQSIIAYTMSLGAENSVAYSNNSIAIP
TNFTISVTTEILPVSMTKTSVDCTMYICGDSTECSNLLLQYGSFCTQLNRALTGIAVEQDKNTQE
VFAQVKQIYKTPPIKDFGGFNFSQILPDPSKPSKRSFIEDLLFNKVTLADAGFIKQYGDCLGDIA
ARDLICAQKFNGLTVLPPLLTDEMIAQYTSALLAGTITSGWTFGAGPALQIPFAMQMAYRFNGIG
VTQNVLYENQKLIANQFNSAIGKIQDSLSSTASALGKLQDVVNQNAQALNTLVKQLSSNFGAISS
VLNDILSRLDPPEAEVQIDRLITGRLQSLQTYVTQQLIRAAEIRASANLAATKMSECVLGQSKRV
DFCGKGYHLMSFPQSAPHGVVFLHVTYVPAQEKNFTTAPAICHDGKAHFPREGVFVSNGTHWFVT
QRNFYEPQIITTDNTFVSGNCDVVIGIVNNTVYDPLQPELDSFKEELDKYFKNHTSPDVDLGDIS
GINASVVNIQKEIDRLNEVAKNLNESLIDLQELGKYEQGSGYIPEAPRDGQAYVRKDGEWVLLST
FLGRSLEVLFQGPGSLPETGGGSDYKDDDDKGGGGSGGGGSGGGGSGGGGSGGGGSHHHHHH
SEQ ID NO 114: SEQ ID NO 3 + A892P + T572I
MFVFLVLLPLVSSQCVNLTTRTQLPPAYTNSFTRGVYYPDKVFRSSVLHSTQDLFLPFFSNVTWF
HAIHVSGTNGTKRFDNPVLPFNDGVYFASTEKSNIIRGWIFGTTLDSKTQSLLIVNNATNVVIKV
CEFQFCNDPFLGVYYHKNNKSWMESEFRVYSSANNCTFEYVSQPFLMDLEGKQGNFKNLREFVFK
NIDGYFKIYSKHTPINLVRDLPQGFSALEPLVDLPIGINITRFQTLLALHRSYLTPGDSSSGWTA
GAAAYYVGYLQPRTFLLKYNENGTITDAVDCALDPLSETKCTLKSFTVEKGIYQTSNFRVQPTES
IVRFPNITNLCPFGEVFNATRFASVYAWNRKRISNCVADYSVLYNSASFSTFKCYGVSPTKLNDL
CFTNVYADSFVIRGDEVRQIAPGQTGKIADYNYKLPDDFTGCVIAWNSNNLDSKVGGNYNYLYRL
FRKSNLKPFERDISTEIYQAGSTPCNGVEGFNCYFPLQSYGFQPTNGVGYQPYRVVVLSFELLHA
PATVCGPKKSTNLVKNKCVNFNFNGLTGTGVLTESNKKFLPFQQFGRDIADITDAVRDPQTLEIL
DITPCSFGGVSVITPGTNTSNQVAVLYQDVNCTEVPVAIHADQLTPTWRVYSTGSNVFQTRAGCL
IGAEHVNNSYECDIPIGAGICASYQTQTNSPSRAGSVASQSIIAYTMSLGAENSVAYSNNSIAIP
TNFTISVTTEILPVSMTKTSVDCTMYICGDSTECSNLLLQYGSFCTQLNRALTGIAVEQDKNTQE
VFAQVKQIYKTPPIKDFGGFNFSQILPDPSKPSKRSFIEDLLFNKVTLADAGFIKQYGDCLGDIA
ARDLICAQKFNGLTVLPPLLTDEMIAQYTSALLAGTITSGWTFGAGPALQIPFAMQMAYRFNGIG
VTQNVLYENQKLIANQFNSAIGKIQDSLSSTASALGKLQDVVNQNAQALNTLVKQLSSNFGAISS
VLNDILSRLDPPEAEVQIDRLITGRLQSLQTYVTQQLIRAAEIRASANLAATKMSECVLGQSKRV
DFCGKGYHLMSFPQSAPHGVVFLHVTYVPAQEKNFTTAPAICHDGKAHFPREGVFVSNGTHWFVT
QRNFYEPQIITTDNTFVSGNCDVVIGIVNNTVYDPLQPELDSFKEELDKYFKNHTSPDVDLGDIS
GINASVVNIQKEIDRLNEVAKNLNESLIDLQELGKYEQGSGYIPEAPRDGQAYVRKDGEWVLLST
FLGRSLEVLFQGPGSLPETGGGSDYKDDDDKGGGGGGGGSGGGGSGGGGSGGGGSHHHHHH
SEQ ID NO 115: SEQ ID NO 3 + A892P + N532P
MFVFLVLLPLVSSQCVNLTTRTQLPPAYTNSFTRGVYYPDKVFRSSVLHSTQDLFLPFFSNVTWF
HAIHVSGTNGTKRFDNPVLPFNDGVYFASTEKSNIIRGWIFGTTLDSKTQSLLIVNNATNVVIKV
CEFQFCNDPFLGVYYHKNNKSWMESEFRVYSSANNCTFEYVSQPFLMDLEGKQGNFKNLREFVFK
NIDGYFKIYSKHTPINLVRDLPQGFSALEPLVDLPIGINITRFQTLLALHRSYLTPGDSSSGWTA
GAAAYYVGYLQPRTFLLKYNENGTITDAVDCALDPLSETKCTLKSFTVEKGIYQTSNFRVQPTES
IVRFPNITNLCPFGEVFNATRFASVYAWNRKRISNCVADYSVLYNSASFSTFKCYGVSPTKLNDL
CFTNVYADSFVIRGDEVRQIAPGQTGKIADYNYKLPDDFTGCVIAWNSNNLDSKVGGNYNYLYRL
FRKSNLKPFERDISTEIYQAGSTPCNGVEGFNCYFPLQSYGFQPTNGVGYQPYRVVVLSFELLHA
PATVCGPKKSTPLVKNKCVNFNFNGLTGTGVLTESNKKFLPFQQFGRDIADTTDAVRDPQTLEIL
DITPCSFGGVSVITPGTNTSNQVAVLYQDVNCTEVPVAIHADQLTPTWRVYSTGSNVFQTRAGCL
IGAEHVNNSYECDIPIGAGICASYQTQTNSPSRAGSVASQSIIAYTMSLGAENSVAYSNNSIAIP
TNFTISVTTEILPVSMTKTSVDCTMYICGDSTECSNLLLQYGSFCTQLNRALTGIAVEQDKNTQE
VFAQVKQIYKTPPIKDFGGFNFSQILPDPSKPSKRSFIEDLLFNKVTLADAGFIKQYGDCLGDIA
ARDLICAQKFNGLTVLPPLLTDEMIAQYTSALLAGTITSGWTFGAGPALQIPFAMQMAYRFNGIG
VTQNVLYENQKLIANQFNSAIGKIQDSLSSTASALGKLQDVVNQNAQALNTLVKQLSSNFGAISS
VLNDILSRLDPPEAEVQIDRLITGRLQSLQTYVTQQLIRAAEIRASANLAATKMSECVLGQSKRV
DFCGKGYHLMSFPQSAPHGVVFLHVTYVPAQEKNFTTAPAICHDGKAHFPREGVFVSNGTHWFVT
QRNFYEPQIITTDNTFVSGNCDVVIGIVNNTVYDPLQPELDSFKEELDKYFKNHTSPDVDLGDIS
GINASVVNIQKEIDRLNEVAKNLNESLIDLQELGKYEQGSGYIPEAPRDGQAYVRKDGEWVLLST
FLGRSLEVLFQGPGSLPETGGGSDYKDDDDKGGGGSGGGGSGGGGSGGGGSGGGGSHHHHHH
SEQ ID NO 116: SEQ ID NO 3 + A892P + G880C + F888C
MFVFLVLLPLVSSQCVNLTTRTQLPPAYTNSFTRGVYYPDKVFRSSVLHSTQDLFLPFFSNVTWF
HAIHVSGTNGTKRFDNPVLPFNDGVYFASTEKSNIIRGWIFGTTLDSKTQSLLIVNNATNVVIKV
CEFQFCNDPFLGVYYHKNNKSWMESEFRVYSSANNCTFEYVSQPFLMDLEGKQGNFKNLREFVFK
NIDGYFKIYSKHTPINLVRDLPQGFSALEPLVDLPIGINITRFQTLLALHRSYLTPGDSSSGWTA
GAAAYYVGYLQPRTFLLKYNENGTITDAVDCALDPLSETKCTLKSFTVEKGIYQTSNFRVQPTES
IVRFPNITNLCPFGEVFNATRFASVYAWNRKRISNCVADYSVLYNSASFSTFKCYGVSPTKLNDL
CFTNVYADSFVIRGDEVRQIAPGQTGKIADYNYKLPDDFTGCVIAWNSNNLDSKVGGNYNYLYRL
FRKSNLKPFERDISTEIYQAGSTPCNGVEGFNCYFPLQSYGFQPTNGVGYQPYRVVVLSFELLHA
PATVCGPKKSTNLVKNKCVNFNFNGLTGTGVLTESNKKFLPFQQFGRDIADTTDAVRDPQTLEIL
DITPCSFGGVSVITPGTNTSNQVAVLYQDVNCTEVPVAIHADQLTPTWRVYSTGSNVFQTRAGCL
IGAEHVNNSYECDIPIGAGICASYQTQTNSPSRAGSVASQSIIAYTMSLGAENSVAYSNNSIAIP
TNFTISVTTEILPVSMTKTSVDCTMYICGDSTECSNLLLQYGSFCTQLNRALTGIAVEQDKNTQE
VFAQVKQIYKTPPIKDFGGFNFSQILPDPSKPSKRSFIEDLLFNKVTLADAGFIKQYGDCLGDIA
ARDLICAQKFNGLTVLPPLLTDEMIAQYTSALLACTITSGWTCGAGPALQIPFAMQMAYRFNGIG
VTQNVLYENQKLIANQFNSAIGKIQDSLSSTASALGKLQDVVNQNAQALNTLVKQLSSNFGAISS
VLNDILSRLDPPEAEVQIDRLITGRLQSLQTYVTQQLIRAAEIRASANLAATKMSECVLGQSKRV
DFCGKGYHLMSFPQSAPHGVVFLHVTYVPAQEKNFTTAPAICHDGKAHFPREGVFVSNGTHWFVT
QRNFYEPQIITTDNTFVSGNCDVVIGIVNNTVYDPLQPELDSFKEELDKYFKNHTSPDVDLGDIS
GINASVVNIQKEIDRLNEVAKNLNESLIDLQELGKYEQGSGYIPEAPRDGQAYVRKDGEWVLLST
FLGRSLEVLFQGPGSLPETGGGSDYKDDDDKGGGGSGGGGSGGGGSGGGGSGGGGSHHHHHH
SEQ ID NO 117: SEQ ID NO 3 + A892P + S884C + A893C
MFVFLVLLPLVSSQCVNLTTRTQLPPAYTNSFTRGVYYPDKVFRSSVLHSTQDLFLPFFSNVTWF
HAIHVSGTNGTKRFDNPVLPFNDGVYFASTEKSNIIRGWIFGTTLDSKTQSLLIVNNATNVVIKV
CEFQFCNDPFLGVYYHKNNKSWMESEFRVYSSANNCTFEYVSQPFLMDLEGKQGNFKNLREFVFK
NIDGYFKIYSKHTPINLVRDLPQGFSALEPLVDLPIGINITRFQTLLALHRSYLTPGDSSSGWTA
GAAAYYVGYLQPRTFLLKYNENGTITDAVDCALDPLSETKCTLKSFTVEKGIYQTSNFRVQPTES
IVRFPNITNLCPFGEVFNATRFASVYAWNRKRISNCVADYSVLYNSASFSTFKCYGVSPTKLNDL
CFTNVYADSFVIRGDEVRQIAPGQTGKIADYNYKLPDDFTGCVIAWNSNNLDSKVGGNYNYLYRL
FRKSNLKPFERDISTEIYQAGSTPCNGVEGFNCYFPLQSYGFQPTNGVGYQPYRVVVLSFELLHA
PATVCGPKKSTNLVKNKCVNFNFNGLTGTGVLTESNKKFLPFQQFGRDIADTTDAVRDPQTLEIL
DITPCSFGGVSVITPGTNTSNQVAVLYQDVNCTEVPVAIHADQLTPTWRVYSTGSNVFQTRAGCL
IGAEHVNNSYECDIPIGAGICASYQTQTNSPSRAGSVASQSIIAYTMSLGAENSVAYSNNSIAIP
TNFTISVTTEILPVSMTKTSVDCTMYICGDSTECSNLLLQYGSFCTQLNRALTGIAVEQDKNTQE
VFAQVKQIYKTPPIKDFGGFNFSQILPDPSKPSKRSFIEDLLFNKVTLADAGFIKQYGDCLGDIA
ARDLICAQKFNGLTVLPPLLTDEMIAQYTSALLAGTITCGWTFGAGPCLQIPFAMQMAYRFNGIG
VTQNVLYENQKLIANQFNSAIGKIQDSLSSTASALGKLQDVVNQNAQALNTLVKQLSSNFGAISS
VLNDILSRLDPPEAEVQIDRLITGRLQSLQTYVTQQLIRAAEIRASANLAATKMSECVLGQSKRV
DFCGKGYHLMSFPQSAPHGVVFLHVTYVPAQEKNFTTAPAICHDGKAHFPREGVFVSNGTHWFVT
QRNFYEPQIITTDNTFVSGNCDVVIGIVNNTVYDPLQPELDSFKEELDKYFKNHTSPDVDLGDIS
GINASVVNIQKEIDRLNEVAKNLNESLIDLQELGKYEQGSGYIPEAPRDGQAYVRKDGEWVLLST
FLGRSLEVLFQGPGSLPETGGGSDYKDDDDKGGGGSGGGGSGGGGSGGGGSGGGGSHHHHHH
SEQ ID NO 118: SEQ ID NO 3 + D614N + T572I
MFVFLVLLPLVSSQCVNLTTRTQLPPAYTNSFTRGVYYPDKVFRSSVLHSTQDLFLPFFSNVTWF
HAIHVSGTNGTKRFDNPVLPFNDGVYFASTEKSNIIRGWIFGTTLDSKTQSLLIVNNATNVVIKV
CEFQFCNDPFLGVYYHKNNKSWMESEFRVYSSANNCTFEYVSQPFLMDLEGKQGNFKNLREFVFK
NIDGYFKIYSKHTPINLVRDLPQGFSALEPLVDLPIGINITRFQTLLALHRSYLTPGDSSSGWTA
GAAAYYVGYLQPRTFLLKYNENGTITDAVDCALDPLSETKCTLKSFTVEKGIYQTSNFRVQPTES
IVRFPNITNLCPFGEVFNATRFASVYAWNRKRISNCVADYSVLYNSASFSTFKCYGVSPTKLNDL
CFTNVYADSFVIRGDEVRQIAPGQTGKIADYNYKLPDDFTGCVIAWNSNNLDSKVGGNYNYLYRL
FRKSNLKPFERDISTEIYQAGSTPCNGVEGFNCYFPLQSYGFQPTNGVGYQPYRVVVLSFELLHA
PATVCGPKKSTNLVKNKCVNFNFNGLTGTGVLTESNKKFLPFQQFGRDIADITDAVRDPQTLEIL
DITPCSFGGVSVITPGTNTSNQVAVLYQNVNCTEVPVAIHADQLTPTWRVYSTGSNVFQTRAGCL
IGAEHVNNSYECDIPIGAGICASYQTQTNSPSRAGSVASQSIIAYTMSLGAENSVAYSNNSIAIP
TNFTISVTTEILPVSMTKTSVDCTMYICGDSTECSNLLLQYGSFCTQLNRALTGIAVEQDKNTQE
VFAQVKQIYKTPPIKDFGGFNFSQILPDPSKPSKRSFIEDLLFNKVTLADAGFIKQYGDCLGDIA
ARDLICAQKFNGLTVLPPLLTDEMIAQYTSALLAGTITSGWTFGAGAALQIPFAMQMAYRFNGIG
VTQNVLYENQKLIANQFNSAIGKIQDSLSSTASALGKLQDVVNQNAQALNTLVKQLSSNFGAISS
VLNDILSRLDPPEAEVQIDRLITGRLQSLQTYVTQQLIRAAEIRASANLAATKMSECVLGQSKRV
DFCGKGYHLMSFPQSAPHGVVFLHVTYVPAQEKNFTTAPAICHDGKAHFPREGVFVSNGTHWFVT
QRNFYEPQIITTDNTFVSGNCDVVIGIVNNTVYDPLQPELDSFKEELDKYFKNHTSPDVDLGDIS
GINASVVNIQKEIDRLNEVAKNLNESLIDLQELGKYEQGSGYIPEAPRDGQAYVRKDGEWVLLST
FLGRSLEVLFQGPGSLPETGGGSDYKDDDDKGGGGSGGGGSGGGGSGGGGSGGGGSHHHHHH
SEQ ID NO 119: SEQ ID NO 3 + D614N + N532P
MFVFLVLLPLVSSQCVNLTTRTQLPPAYTNSFTRGVYYPDKVFRSSVLHSTQDLFLPFFSNVTWF
HAIHVSGTNGTKRFDNPVLPFNDGVYFASTEKSNIIRGWIFGTTLDSKTQSLLIVNNATNVVIKV
CEFQFCNDPFLGVYYHKNNKSWMESEFRVYSSANNCTFEYVSQPFLMDLEGKQGNFKNLREFVFK
NIDGYFKIYSKHTPINLVRDLPQGFSALEPLVDLPIGINITRFQTLLALHRSYLTPGDSSSGWTA
GAAAYYVGYLQPRTFLLKYNENGTITDAVDCALDPLSETKCTLKSFTVEKGIYQTSNFRVQPTES
IVRFPNITNLCPFGEVFNATRFASVYAWNRKRISNCVADYSVLYNSASFSTFKCYGVSPTKLNDL
CFTNVYADSFVIRGDEVRQIAPGQTGKIADYNYKLPDDFTGCVIAWNSNNLDSKVGGNYNYLYRL
FRKSNLKPFERDISTEIYQAGSTPCNGVEGFNCYFPLQSYGFQPTNGVGYQPYRVVVLSFELLHA
PATVCGPKKSTPLVKNKCVNFNFNGLTGTGVLTESNKKFLPFQQFGRDIADTTDAVRDPQTLEIL
DITPCSFGGVSVITPGTNTSNQVAVLYQNVNCTEVPVAIHADQLTPTWRVYSTGSNVFQTRAGCL
IGAEHVNNSYECDIPIGAGICASYQTQTNSPSRAGSVASQSIIAYTMSLGAENSVAYSNNSIAIP
TNFTISVTTEILPVSMTKTSVDCTMYICGDSTECSNLLLQYGSFCTQLNRALTGIAVEQDKNTQE
VFAQVKQIYKTPPIKDFGGFNFSQILPDPSKPSKRSFIEDLLFNKVTLADAGFIKQYGDCLGDIA
ARDLICAQKFNGLTVLPPLLTDEMIAQYTSALLAGTITSGWTFGAGAALQIPFAMQMAYRFNGIG
VTQNVLYENQKLIANQFNSAIGKIQDSLSSTASALGKLQDVVNQNAQALNTLVKQLSSNFGAISS
VLNDILSRLDPPEAEVQIDRLITGRLQSLQTYVTQQLIRAAEIRASANLAATKMSECVLGQSKRV
DFCGKGYHLMSFPQSAPHGVVFLHVTYVPAQEKNFTTAPAICHDGKAHFPREGVFVSNGTHWFVT
QRNFYEPQIITTDNTFVSGNCDVVIGIVNNTVYDPLQPELDSFKEELDKYFKNHTSPDVDLGDIS
GINASVVNIQKEIDRLNEVAKNLNESLIDLQELGKYEQGSGYIPEAPRDGQAYVRKDGEWVLLST
FLGRSLEVLFQGPGSLPETGGGSDYKDDDDKGGGGSGGGGSGGGGSGGGGSGGGGSHHHHHH
SEQ ID NO 120: SEQ ID NO 3 + D614N + G880C + F888C
MFVFLVLLPLVSSQCVNLTTRTQLPPAYTNSFTRGVYYPDKVFRSSVLHSTQDLFLPFFSNVTWF
HAIHVSGTNGTKRFDNPVLPFNDGVYFASTEKSNIIRGWIFGTTLDSKTQSLLIVNNATNVVIKV
CEFQFCNDPFLGVYYHKNNKSWMESEFRVYSSANNCTFEYVSQPFLMDLEGKQGNFKNLREFVFK
NIDGYFKIYSKHTPINLVRDLPQGFSALEPLVDLPIGINITRFQTLLALHRSYLTPGDSSSGWTA
GAAAYYVGYLQPRTFLLKYNENGTITDAVDCALDPLSETKCTLKSFTVEKGIYQTSNFRVQPTES
IVRFPNITNLCPFGEVFNATRFASVYAWNRKRISNCVADYSVLYNSASFSTFKCYGVSPTKLNDL
CFTNVYADSFVIRGDEVRQIAPGQTGKIADYNYKLPDDFTGCVIAWNSNNLDSKVGGNYNYLYRL
FRKSNLKPFERDISTEIYQAGSTPCNGVEGFNCYFPLQSYGFQPTNGVGYQPYRVVVLSFELLHA
PATVCGPKKSTNLVKNKCVNFNFNGLTGTGVLTESNKKFLPFQQFGRDIADTTDAVRDPQTLEIL
DITPCSFGGVSVITPGTNTSNQVAVLYQNVNCTEVPVAIHADQLTPTWRVYSTGSNVFQTRAGCL
IGAEHVNNSYECDIPIGAGICASYQTQTNSPSRAGSVASQSIIAYTMSLGAENSVAYSNNSIAIP
TNFTISVTTEILPVSMTKTSVDCTMYICGDSTECSNLLLQYGSFCTQLNRALTGIAVEQDKNTQE
VFAQVKQIYKTPPIKDFGGFNFSQILPDPSKPSKRSFIEDLLFNKVTLADAGFIKQYGDCLGDIA
ARDLICAQKFNGLTVLPPLLTDEMIAQYTSALLACTITSGWTCGAGAALQIPFAMQMAYRFNGIG
VTQNVLYENQKLIANQFNSAIGKIQDSLSSTASALGKLQDVVNQNAQALNTLVKQLSSNFGAISS
VLNDILSRLDPPEAEVQIDRLITGRLQSLQTYVTQQLIRAAEIRASANLAATKMSECVLGQSKRV
DFCGKGYHLMSFPQSAPHGVVFLHVTYVPAQEKNFTTAPAICHDGKAHFPREGVFVSNGTHWFVT
QRNFYEPQIITTDNTFVSGNCDVVIGIVNNTVYDPLQPELDSFKEELDKYFKNHTSPDVDLGDIS
GINASVVNIQKEIDRLNEVAKNLNESLIDLQELGKYEQGSGYIPEAPRDGQAYVRKDGEWVLLST
FLGRSLEVLFQGPGSLPETGGGSDYKDDDDKGGGGSGGGGSGGGGSGGGGSGGGGSHHHHHH
SEQ ID NO 121: SEQ ID NO 3 + D614N + S884C + A893C
MFVFLVLLPLVSSQCVNLTTRTQLPPAYTNSFTRGVYYPDKVFRSSVLHSTQDLFLPFFSNVTWF
HAIHVSGTNGTKRFDNPVLPFNDGVYFASTEKSNIIRGWIFGTTLDSKTQSLLIVNNATNVVIKV
CEFQFCNDPFLGVYYHKNNKSWMESEFRVYSSANNCTFEYVSQPFLMDLEGKQGNFKNLREFVFK
NIDGYFKIYSKHTPINLVRDLPQGFSALEPLVDLPIGINITRFQTLLALHRSYLTPGDSSSGWTA
GAAAYYVGYLQPRTFLLKYNENGTITDAVDCALDPLSETKCTLKSFTVEKGIYQTSNFRVQPTES
IVRFPNITNLCPFGEVFNATRFASVYAWNRKRISNCVADYSVLYNSASFSTFKCYGVSPTKLNDL
CFTNVYADSFVIRGDEVRQIAPGQTGKIADYNYKLPDDFTGCVIAWNSNNLDSKVGGNYNYLYRL
FRKSNLKPFERDISTEIYQAGSTPCNGVEGFNCYFPLQSYGFQPTNGVGYQPYRVVVLSFELLHA
PATVCGPKKSTNLVKNKCVNFNFNGLTGTGVLTESNKKFLPFQQFGRDIADTTDAVRDPQTLEIL
DITPCSFGGVSVITPGTNTSNQVAVLYQNVNCTEVPVAIHADQLTPTWRVYSTGSNVFQTRAGCL
IGAEHVNNSYECDIPIGAGICASYQTQTNSPSRAGSVASQSIIAYTMSLGAENSVAYSNNSIAIP
TNFTISVTTEILPVSMTKTSVDCTMYICGDSTECSNLLLQYGSFCTQLNRALTGIAVEQDKNTQE
VFAQVKQIYKTPPIKDFGGFNFSQILPDPSKPSKRSFIEDLLFNKVTLADAGFIKQYGDCLGDIA
ARDLICAQKFNGLTVLPPLLTDEMIAQYTSALLAGTITCGWTFGAGACLQIPFAMQMAYRFNGIG
VTQNVLYENQKLIANQFNSAIGKIQDSLSSTASALGKLQDVVNQNAQALNTLVKQLSSNFGAISS
VLNDILSRLDPPEAEVQIDRLITGRLQSLQTYVTQQLIRAAEIRASANLAATKMSECVLGQSKRV
DFCGKGYHLMSFPQSAPHGVVFLHVTYVPAQEKNFTTAPAICHDGKAHFPREGVFVSNGTHWFVT
QRNFYEPQIITTDNTFVSGNCDVVIGIVNNTVYDPLQPELDSFKEELDKYFKNHTSPDVDLGDIS
GINASVVNIQKEIDRLNEVAKNLNESLIDLQELGKYEQGSGYIPEAPRDGQAYVRKDGEWVLLST
FLGRSLEVLFQGPGSLPETGGGSDYKDDDDKGGGGSGGGGSGGGGSGGGGSGGGGSHHHHHH
SEQ ID NO 122: SEQ ID NO 3 + T572I +
N532P
MFVFLVLLPLVSSQCVNLTTRTQLPPAYTNSFTRGVYYPDKVFRSSVLHSTQDLFLPFFSNVTWF
HAIHVSGTNGTKRFDNPVLPFNDGVYFASTEKSNIIRGWIFGTTLDSKTQSLLIVNNATNVVIKV
CEFQFCNDPFLGVYYHKNNKSWMESEFRVYSSANNCTFEYVSQPFLMDLEGKQGNFKNLREFVFK
NIDGYFKIYSKHTPINLVRDLPQGFSALEPLVDLPIGINITRFQTLLALHRSYLTPGDSSSGWTA
GAAAYYVGYLQPRTFLLKYNENGTITDAVDCALDPLSETKCTLKSFTVEKGIYQTSNFRVQPTES
IVRFPNITNLCPFGEVFNATRFASVYAWNRKRISNCVADYSVLYNSASFSTFKCYGVSPTKLNDL
CFTNVYADSFVIRGDEVRQIAPGQTGKIADYNYKLPDDFTGCVIAWNSNNLDSKVGGNYNYLYRL
FRKSNLKPFERDISTEIYQAGSTPCNGVEGFNCYFPLQSYGFQPTNGVGYQPYRVVVLSFELLHA
PATVCGPKKSTPLVKNKCVNFNFNGLTGTGVLTESNKKFLPFQQFGRDIADITDAVRDPQTLEIL
DITPCSFGGVSVITPGTNTSNQVAVLYQDVNCTEVPVAIHADQLTPTWRVYSTGSNVFQTRAGCL
IGAEHVNNSYECDIPIGAGICASYQTQTNSPSRAGSVASQSIIAYTMSLGAENSVAYSNNSIAIP
TNFTISVTTEILPVSMTKTSVDCTMYICGDSTECSNLLLQYGSFCTQLNRALTGIAVEQDKNTQE
VFAQVKQIYKTPPIKDFGGFNFSQILPDPSKPSKRSFIEDLLFNKVTLADAGFIKQYGDCLGDIA
ARDLICAQKFNGLTVLPPLLTDEMIAQYTSALLAGTITSGWTFGAGAALQIPFAMQMAYRFNGIG
VTQNVLYENQKLIANQFNSAIGKIQDSLSSTASALGKLQDVVNQNAQALNTLVKQLSSNFGAISS
VLNDILSRLDPPEAEVQIDRLITGRLQSLQTYVTQQLIRAAEIRASANLAATKMSECVLGQSKRV
DFCGKGYHLMSFPQSAPHGVVFLHVTYVPAQEKNFTTAPAICHDGKAHFPREGVFVSNGTHWFVT
QRNFYEPQIITTDNTFVSGNCDVVIGIVNNTVYDPLQPELDSFKEELDKYFKNHTSPDVDLGDIS
GINASVVNIQKEIDRLNEVAKNLNESLIDLQELGKYEQGSGYIPEAPRDGQAYVRKDGEWVLLST
FLGRSLEVLFQGPGSLPETGGGSDYKDDDDKGGGGSGGGGSGGGGSGGGGSGGGGSHHHHHH
SEQ ID NO 123: SEQ ID NO 3 + T572I +
G880C + F888C
MFVFLVLLPLVSSQCVNLTTRTQLPPAYTNSFTRGVYYPDKVFRSSVLHSTQDLFLPFFSNVTWF
HAIHVSGTNGTKRFDNPVLPFNDGVYFASTEKSNIIRGWIFGTTLDSKTQSLLIVNNATNVVIKV
CEFQFCNDPFLGVYYHKNNKSWMESEFRVYSSANNCTFEYVSQPFLMDLEGKQGNFKNLREFVFK
NIDGYFKIYSKHTPINLVRDLPQGFSALEPLVDLPIGINITRFQTLLALHRSYLTPGDSSSGWTA
GAAAYYVGYLQPRTFLLKYNENGTITDAVDCALDPLSETKCTLKSFTVEKGIYQTSNFRVQPTES
IVRFPNITNLCPFGEVFNATRFASVYAWNRKRISNCVADYSVLYNSASFSTFKCYGVSPTKLNDL
CFTNVYADSFVIRGDEVRQIAPGQTGKIADYNYKLPDDFTGCVIAWNSNNLDSKVGGNYNYLYRL
FRKSNLKPFERDISTEIYQAGSTPCNGVEGFNCYFPLQSYGFQPTNGVGYQPYRVVVLSFELLHA
PATVCGPKKSTNLVKNKCVNFNFNGLTGTGVLTESNKKFLPFQQFGRDIADITDAVRDPQTLEIL
DITPCSFGGVSVITPGTNTSNQVAVLYQDVNCTEVPVAIHADQLTPTWRVYSTGSNVFQTRAGCL
IGAEHVNNSYECDIPIGAGICASYQTQTNSPSRAGSVASQSIIAYTMSLGAENSVAYSNNSIAIP
TNFTISVTTEILPVSMTKTSVDCTMYICGDSTECSNLLLQYGSFCTQLNRALTGIAVEQDKNTQE
VFAQVKQIYKTPPIKDFGGFNFSQILPDPSKPSKRSFIEDLLFNKVTLADAGFIKQYGDCLGDIA
ARDLICAQKFNGLTVLPPLLTDEMIAQYTSALLACTITSGWTCGAGAALQIPFAMQMAYRFNGIG
VTQNVLYENQKLIANQFNSAIGKIQDSLSSTASALGKLQDVVNQNAQALNTLVKQLSSNFGAISS
VLNDILSRLDPPEAEVQIDRLITGRLQSLQTYVTQQLIRAAEIRASANLAATKMSECVLGQSKRV
DFCGKGYHLMSFPQSAPHGVVFLHVTYVPAQEKNFTTAPAICHDGKAHFPREGVFVSNGTHWFVT
QRNFYEPQIITTDNTFVSGNCDVVIGIVNNTVYDPLQPELDSFKEELDKYFKNHTSPDVDLGDIS
GINASVVNIQKEIDRLNEVAKNLNESLIDLQELGKYEQGSGYIPEAPRDGQAYVRKDGEWVLLST
FLGRSLEVLFQGPGSLPETGGGSDYKDDDDKGGGGSGGGGSGGGGSGGGGSGGGGSHHHHHH
SEQ ID NO 124: SEQ ID NO 3 + T572I +
S884C + A893C
MFVFLVLLPLVSSQCVNLTTRTQLPPAYTNSFTRGVYYPDKVFRSSVLHSTQDLFLPFFSNVTWF
HAIHVSGTNGTKRFDNPVLPFNDGVYFASTEKSNIIRGWIFGTTLDSKTQSLLIVNNATNVVIKV
CEFQFCNDPFLGVYYHKNNKSWMESEFRVYSSANNCTFEYVSQPFLMDLEGKQGNFKNLREFVFK
NIDGYFKIYSKHTPINLVRDLPQGFSALEPLVDLPIGINITRFQTLLALHRSYLTPGDSSSGWTA
GAAAYYVGYLQPRTFLLKYNENGTITDAVDCALDPLSETKCTLKSFTVEKGIYQTSNFRVQPTES
IVRFPNITNLCPFGEVFNATRFASVYAWNRKRISNCVADYSVLYNSASFSTFKCYGVSPTKLNDL
CFTNVYADSFVIRGDEVRQIAPGQTGKIADYNYKLPDDFTGCVIAWNSNNLDSKVGGNYNYLYRL
FRKSNLKPFERDISTEIYQAGSTPCNGVEGFNCYFPLQSYGFQPTNGVGYQPYRVVVLSFELLHA
PATVCGPKKSTNLVKNKCVNFNFNGLTGTGVLTESNKKFLPFQQFGRDIADITDAVRDPQTLEIL
DITPCSFGGVSVITPGTNTSNQVAVLYQDVNCTEVPVAIHADQLTPTWRVYSTGSNVFQTRAGCL
IGAEHVNNSYECDIPIGAGICASYQTQTNSPSRAGSVASQSIIAYTMSLGAENSVAYSNNSIAIP
TNFTISVTTEILPVSMTKTSVDCTMYICGDSTECSNLLLQYGSFCTQLNRALTGIAVEQDKNTQE
VFAQVKQIYKTPPIKDFGGFNFSQILPDPSKPSKRSFIEDLLFNKVTLADAGFIKQYGDCLGDIA
ARDLICAQKFNGLTVLPPLLTDEMIAQYTSALLAGTITCGWTFGAGACLQIPFAMQMAYRFNGIG
VTQNVLYENQKLIANQFNSAIGKIQDSLSSTASALGKLQDVVNQNAQALNTLVKQLSSNFGAISS
VLNDILSRLDPPEAEVQIDRLITGRLQSLQTYVTQQLIRAAEIRASANLAATKMSECVLGQSKRV
DFCGKGYHLMSFPQSAPHGVVFLHVTYVPAQEKNFTTAPAICHDGKAHFPREGVFVSNGTHWFVT
QRNFYEPQIITTDNTFVSGNCDVVIGIVNNTVYDPLQPELDSFKEELDKYFKNHTSPDVDLGDIS
GINASVVNIQKEIDRLNEVAKNLNESLIDLQELGKYEQGSGYIPEAPRDGQAYVRKDGEWVLLST
FLGRSLEVLFQGPGSLPETGGGSDYKDDDDKGGGGSGGGGSGGGGSGGGGSGGGGSHHHHHH
SEQ ID NO 125: SEQ ID NO 3 + N532P + G880C + F888C
MFVFLVLLPLVSSQCVNLTTRTQLPPAYTNSFTRGVYYPDKVFRSSVLHSTQDLFLPFFSNVTWF
HAIHVSGTNGTKRFDNPVLPFNDGVYFASTEKSNIIRGWIFGTTLDSKTQSLLIVNNATNVVIKV
CEFQFCNDPFLGVYYHKNNKSWMESEFRVYSSANNCTFEYVSQPFLMDLEGKQGNFKNLREFVFK
NIDGYFKIYSKHTPINLVRDLPQGFSALEPLVDLPIGINITRFQTLLALHRSYLTPGDSSSGWTA
GAAAYYVGYLQPRTFLLKYNENGTITDAVDCALDPLSETKCTLKSFTVEKGIYQTSNFRVQPTES
IVRFPNITNLCPFGEVFNATRFASVYAWNRKRISNCVADYSVLYNSASFSTFKCYGVSPTKLNDL
CFTNVYADSFVIRGDEVRQIAPGQTGKIADYNYKLPDDFTGCVIAWNSNNLDSKVGGNYNYLYRL
FRKSNLKPFERDISTEIYQAGSTPCNGVEGFNCYFPLQSYGFQPTNGVGYQPYRVVVLSFELLHA
PATVCGPKKSTPLVKNKCVNFNFNGLTGTGVLTESNKKFLPFQQFGRDIADTTDAVRDPQTLEIL
DITPCSFGGVSVITPGTNTSNQVAVLYQDVNCTEVPVAIHADQLTPTWRVYSTGSNVFQTRAGCL
IGAEHVNNSYECDIPIGAGICASYQTQTNSPSRAGSVASQSIIAYTMSLGAENSVAYSNNSIAIP
TNFTISVTTEILPVSMTKTSVDCTMYICGDSTECSNLLLQYGSFCTQLNRALTGIAVEQDKNTQE
VFAQVKQIYKTPPIKDFGGFNFSQILPDPSKPSKRSFIEDLLFNKVTLADAGFIKQYGDCLGDIA
ARDLICAQKFNGLTVLPPLLTDEMIAQYTSALLACTITSGWTCGAGAALQIPFAMQMAYRFNGIG
VTQNVLYENQKLIANQFNSAIGKIQDSLSSTASALGKLQDVVNQNAQALNTLVKQLSSNFGAISS
VLNDILSRLDPPEAEVQIDRLITGRLQSLQTYVTQQLIRAAEIRASANLAATKMSECVLGQSKRV
DFCGKGYHLMSFPQSAPHGVVFLHVTYVPAQEKNFTTAPAICHDGKAHFPREGVFVSNGTHWFVT
QRNFYEPQIITTDNTFVSGNCDVVIGIVNNTVYDPLQPELDSFKEELDKYFKNHTSPDVDLGDIS
GINASVVNIQKEIDRLNEVAKNLNESLIDLQELGKYEQGSGYIPEAPRDGQAYVRKDGEWVLLST
FLGRSLEVLFQGPGSLPETGGGSDYKDDDDKGGGGSGGGGSGGGGSGGGGSGGGGSHHHHHH
SEQ ID NO 126: SEQ ID NO 3 + N532P + S884C + A893C
MFVFLVLLPLVSSQCVNLTTRTQLPPAYTNSFTRGVYYPDKVFRSSVLHSTQDLFLPFFSNVTWF
HAIHVSGTNGTKRFDNPVLPFNDGVYFASTEKSNIIRGWIFGTTLDSKTQSLLIVNNATNVVIKV
CEFQFCNDPFLGVYYHKNNKSWMESEFRVYSSANNCTFEYVSQPFLMDLEGKQGNFKNLREFVFK
NIDGYFKIYSKHTPINLVRDLPQGFSALEPLVDLPIGINITRFQTLLALHRSYLTPGDSSSGWTA
GAAAYYVGYLQPRTFLLKYNENGTITDAVDCALDPLSETKCTLKSFTVEKGIYQTSNFRVQPTES
IVRFPNITNLCPFGEVFNATRFASVYAWNRKRISNCVADYSVLYNSASFSTFKCYGVSPTKLNDL
CFTNVYADSFVIRGDEVRQIAPGQTGKIADYNYKLPDDFTGCVIAWNSNNLDSKVGGNYNYLYRL
FRKSNLKPFERDISTEIYQAGSTPCNGVEGFNCYFPLQSYGFQPTNGVGYQPYRVVVLSFELLHA
PATVCGPKKSTPLVKNKCVNFNFNGLTGTGVLTESNKKFLPFQQFGRDIADTTDAVRDPQTLEIL
DITPCSFGGVSVITPGTNTSNQVAVLYQDVNCTEVPVAIHADQLTPTWRVYSTGSNVFQTRAGCL
IGAEHVNNSYECDIPIGAGICASYQTQTNSPSRAGSVASQSIIAYTMSLGAENSVAYSNNSIAIP
TNFTISVTTEILPVSMTKTSVDCTMYICGDSTECSNLLLQYGSFCTQLNRALTGIAVEQDKNTQE
VFAQVKQIYKTPPIKDFGGFNFSQILPDPSKPSKRSFIEDLLFNKVTLADAGFIKQYGDCLGDIA
ARDLICAQKFNGLTVLPPLLTDEMIAQYTSALLAGTITCGWTFGAGACLQIPFAMQMAYRFNGIG
VTQNVLYENQKLIANQFNSAIGKIQDSLSSTASALGKLQDVVNQNAQALNTLVKQLSSNFGAISS
VLNDILSRLDPPEAEVQIDRLITGRLQSLQTYVTQQLIRAAEIRASANLAATKMSECVLGQSKRV
DFCGKGYHLMSFPQSAPHGVVFLHVTYVPAQEKNFTTAPAICHDGKAHFPREGVFVSNGTHWFVT
QRNFYEPQIITTDNTFVSGNCDVVIGIVNNTVYDPLQPELDSFKEELDKYFKNHTSPDVDLGDIS
GINASVVNIQKEIDRLNEVAKNLNESLIDLQELGKYEQGSGYIPEAPRDGQAYVRKDGEWVLLST
FLGRSLEVLFQGPGSLPETGGGSDYKDDDDKGGGGSGGGGSGGGGSGGGGSGGGGSHHHHHH
SEQ ID NO 127: SEQ ID NO 3 + A942P + A892P + D614N
MFVFLVLLPLVSSQCVNLTTRTQLPPAYTNSFTRGVYYPDKVFRSSVLHSTQDLFLPFFSNVTWF
HAIHVSGTNGTKRFDNPVLPFNDGVYFASTEKSNIIRGWIFGTTLDSKTQSLLIVNNATNVVIKV
CEFQFCNDPFLGVYYHKNNKSWMESEFRVYSSANNCTFEYVSQPFLMDLEGKQGNFKNLREFVFK
NIDGYFKIYSKHTPINLVRDLPQGFSALEPLVDLPIGINITRFQTLLALHRSYLTPGDSSSGWTA
GAAAYYVGYLQPRTFLLKYNENGTITDAVDCALDPLSETKCTLKSFTVEKGIYQTSNFRVQPTES
IVRFPNITNLCPFGEVFNATRFASVYAWNRKRISNCVADYSVLYNSASFSTFKCYGVSPTKLNDL
CFTNVYADSFVIRGDEVRQIAPGQTGKIADYNYKLPDDFTGCVIAWNSNNLDSKVGGNYNYLYRL
FRKSNLKPFERDISTEIYQAGSTPCNGVEGFNCYFPLQSYGFQPTNGVGYQPYRVVVLSFELLHA
PATVCGPKKSTNLVKNKCVNFNFNGLTGTGVLTESNKKFLPFQQFGRDIADTTDAVRDPQTLEIL
DITPCSFGGVSVITPGTNTSNQVAVLYQNVNCTEVPVAIHADQLTPTWRVYSTGSNVFQTRAGCL
IGAEHVNNSYECDIPIGAGICASYQTQTNSPSRAGSVASQSIIAYTMSLGAENSVAYSNNSIAIP
TNFTISVTTEILPVSMTKTSVDCTMYICGDSTECSNLLLQYGSFCTQLNRALTGIAVEQDKNTQE
VFAQVKQIYKTPPIKDFGGFNFSQILPDPSKPSKRSFIEDLLFNKVTLADAGFIKQYGDCLGDIA
ARDLICAQKFNGLTVLPPLLTDEMIAQYTSALLAGTITSGWTFGAGPALQIPFAMQMAYRFNGIG
VTQNVLYENQKLIANQFNSAIGKIQDSLSSTPSALGKLQDVVNQNAQALNTLVKQLSSNFGAISS
VLNDILSRLDPPEAEVQIDRLITGRLQSLQTYVTQQLIRAAEIRASANLAATKMSECVLGQSKRV
DFCGKGYHLMSFPQSAPHGVVFLHVTYVPAQEKNFTTAPAICHDGKAHFPREGVFVSNGTHWFVT
QRNFYEPQIITTDNTFVSGNCDVVIGIVNNTVYDPLQPELDSFKEELDKYFKNHTSPDVDLGDIS
GINASVVNIQKEIDRLNEVAKNLNESLIDLQELGKYEQGSGYIPEAPRDGQAYVRKDGEWVLLST
FLGRSLEVLFQGPGSLPETGGGSDYKDDDDKGGGGSGGGGSGGGGSGGGGSGGGGSHHHHHH
SEQ ID NO 128: SEQ ID NO 3 + A942P + A892P + T572I
MFVFLVLLPLVSSQCVNLTTRTQLPPAYTNSFTRGVYYPDKVFRSSVLHSTQDLFLPFFSNVTWF
HAIHVSGTNGTKRFDNPVLPFNDGVYFASTEKSNIIRGWIFGTTLDSKTQSLLIVNNATNVVIKV
CEFQFCNDPFLGVYYHKNNKSWMESEFRVYSSANNCTFEYVSQPFLMDLEGKQGNFKNLREFVFK
NIDGYFKIYSKHTPINLVRDLPQGFSALEPLVDLPIGINITRFQTLLALHRSYLTPGDSSSGWTA
GAAAYYVGYLQPRTFLLKYNENGTITDAVDCALDPLSETKCTLKSFTVEKGIYQTSNFRVQPTES
IVRFPNITNLCPFGEVFNATRFASVYAWNRKRISNCVADYSVLYNSASFSTFKCYGVSPTKLNDL
CFTNVYADSFVIRGDEVRQIAPGQTGKIADYNYKLPDDFTGCVIAWNSNNLDSKVGGNYNYLYRL
FRKSNLKPFERDISTEIYQAGSTPCNGVEGFNCYFPLQSYGFQPTNGVGYQPYRVVVLSFELLHA
PATVCGPKKSTNLVKNKCVNFNFNGLTGTGVLTESNKKFLPFQQFGRDIADITDAVRDPQTLEIL
DITPCSFGGVSVITPGTNTSNQVAVLYQDVNCTEVPVAIHADQLTPTWRVYSTGSNVFQTRAGCL
IGAEHVNNSYECDIPIGAGICASYQTQTNSPSRAGSVASQSIIAYTMSLGAENSVAYSNNSIAIP
TNFTISVTTEILPVSMTKTSVDCTMYICGDSTECSNLLLQYGSFCTQLNRALTGIAVEQDKNTQE
VFAQVKQIYKTPPIKDFGGFNFSQILPDPSKPSKRSFIEDLLFNKVTLADAGFIKQYGDCLGDIA
ARDLICAQKFNGLTVLPPLLTDEMIAQYTSALLAGTITSGWTFGAGPALQIPFAMQMAYRFNGIG
VTQNVLYENQKLIANQFNSAIGKIQDSLSSTPSALGKLQDVVNQNAQALNTLVKQLSSNFGAISS
VLNDILSRLDPPEAEVQIDRLITGRLQSLQTYVTQQLIRAAEIRASANLAATKMSECVLGQSKRV
DFCGKGYHLMSFPQSAPHGVVFLHVTYVPAQEKNFTTAPAICHDGKAHFPREGVFVSNGTHWFVT
QRNFYEPQIITTDNTFVSGNCDVVIGIVNNTVYDPLQPELDSFKEELDKYFKNHTSPDVDLGDIS
GINASVVNIQKEIDRLNEVAKNLNESLIDLQELGKYEQGSGYIPEAPRDGQAYVRKDGEWVLLST
FLGRSLEVLFQGPGSLPETGGGSDYKDDDDKGGGGSGGGGSGGGGSGGGGSGGGGSHHHHHH
SEQ ID NO 129: SEQ ID NO 3 + A942P + A892P + N532P
MFVFLVLLPLVSSQCVNLTTRTQLPPAYTNSFTRGVYYPDKVFRSSVLHSTQDLFLPFFSNVTWF
HAIHVSGTNGTKRFDNPVLPFNDGVYFASTEKSNIIRGWIFGTTLDSKTQSLLIVNNATNVVIKV
CEFQFCNDPFLGVYYHKNNKSWMESEFRVYSSANNCTFEYVSQPFLMDLEGKQGNFKNLREFVFK
NIDGYFKIYSKHTPINLVRDLPQGFSALEPLVDLPIGINITRFQTLLALHRSYLTPGDSSSGWTA
GAAAYYVGYLQPRTFLLKYNENGTITDAVDCALDPLSETKCTLKSFTVEKGIYQTSNFRVQPTES
IVRFPNITNLCPFGEVFNATRFASVYAWNRKRISNCVADYSVLYNSASFSTFKCYGVSPTKLNDL
CFTNVYADSFVIRGDEVRQIAPGQTGKIADYNYKLPDDFTGCVIAWNSNNLDSKVGGNYNYLYRL
FRKSNLKPFERDISTEIYQAGSTPCNGVEGFNCYFPLQSYGFQPTNGVGYQPYRVVVLSFELLHA
PATVCGPKKSTPLVKNKCVNFNFNGLTGTGVLTESNKKFLPFQQFGRDIADTTDAVRDPQTLEIL
DITPCSFGGVSVITPGTNTSNQVAVLYQDVNCTEVPVAIHADQLTPTWRVYSTGSNVFQTRAGCL
IGAEHVNNSYECDIPIGAGICASYQTQTNSPSRAGSVASQSIIAYTMSLGAENSVAYSNNSIAIP
TNFTISVTTEILPVSMTKTSVDCTMYICGDSTECSNLLLQYGSFCTQLNRALTGIAVEQDKNTQE
VFAQVKQIYKTPPIKDFGGFNFSQILPDPSKPSKRSFIEDLLFNKVTLADAGFIKQYGDCLGDIA
ARDLICAQKFNGLTVLPPLLTDEMIAQYTSALLAGTITSGWTFGAGPALQIPFAMQMAYRFNGIG
VTQNVLYENQKLIANQFNSAIGKIQDSLSSTPSALGKLQDVVNQNAQALNTLVKQLSSNFGAISS
VLNDILSRLDPPEAEVQIDRLITGRLQSLQTYVTQQLIRAAEIRASANLAATKMSECVLGQSKRV
DFCGKGYHLMSFPQSAPHGVVFLHVTYVPAQEKNFTTAPAICHDGKAHFPREGVFVSNGTHWFVT
QRNFYEPQIITTDNTFVSGNCDVVIGIVNNTVYDPLQPELDSFKEELDKYFKNHTSPDVDLGDIS
GINASVVNIQKEIDRLNEVAKNLNESLIDLQELGKYEQGSGYIPEAPRDGQAYVRKDGEWVLLST
FLGRSLEVLFQGPGSLPETGGGSDYKDDDDKGGGGSGGGGSGGGGSGGGGSGGGGSHHHHHH
SEQ ID NO 130: SEQ ID NO 3 + A942P + A892P + G880C + F888C
MFVFLVLLPLVSSQCVNLTTRTQLPPAYTNSFTRGVYYPDKVFRSSVLHSTQDLFLPFFSNVTWF
HAIHVSGTNGTKRFDNPVLPFNDGVYFASTEKSNIIRGWIFGTTLDSKTQSLLIVNNATNVVIKV
CEFQFCNDPFLGVYYHKNNKSWMESEFRVYSSANNCTFEYVSQPFLMDLEGKQGNFKNLREFVFK
NIDGYFKIYSKHTPINLVRDLPQGFSALEPLVDLPIGINITRFQTLLALHRSYLTPGDSSSGWTA
GAAAYYVGYLQPRTFLLKYNENGTITDAVDCALDPLSETKCTLKSFTVEKGIYQTSNFRVQPTES
IVRFPNITNLCPFGEVFNATRFASVYAWNRKRISNCVADYSVLYNSASFSTFKCYGVSPTKLNDL
CFTNVYADSFVIRGDEVRQIAPGQTGKIADYNYKLPDDFTGCVIAWNSNNLDSKVGGNYNYLYRL
FRKSNLKPFERDISTEIYQAGSTPCNGVEGFNCYFPLQSYGFQPTNGVGYQPYRVVVLSFELLHA
PATVCGPKKSTNLVKNKCVNFNFNGLTGTGVLTESNKKFLPFQQFGRDIADTTDAVRDPQTLEIL
DITPCSFGGVSVITPGTNTSNQVAVLYQDVNCTEVPVAIHADQLTPTWRVYSTGSNVFQTRAGCL
IGAEHVNNSYECDIPIGAGICASYQTQTNSPSRAGSVASQSIIAYTMSLGAENSVAYSNNSIAIP
TNFTISVTTEILPVSMTKTSVDCTMYICGDSTECSNLLLQYGSFCTQLNRALTGIAVEQDKNTQE
VFAQVKQIYKTPPIKDFGGFNFSQILPDPSKPSKRSFIEDLLFNKVTLADAGFIKQYGDCLGDIA
ARDLICAQKFNGLTVLPPLLTDEMIAQYTSALLACTITSGWTCGAGPALQIPFAMQMAYRFNGIG
VTQNVLYENQKLIANQFNSAIGKIQDSLSSTPSALGKLQDVVNQNAQALNTLVKQLSSNFGAISS
VLNDILSRLDPPEAEVQIDRLITGRLQSLQTYVTQQLIRAAEIRASANLAATKMSECVLGQSKRV
DFCGKGYHLMSFPQSAPHGVVFLHVTYVPAQEKNFTTAPAICHDGKAHFPREGVFVSNGTHWFVT
QRNFYEPQIITTDNTFVSGNCDVVIGIVNNTVYDPLQPELDSFKEELDKYFKNHTSPDVDLGDIS
GINASVVNIQKEIDRLNEVAKNLNESLIDLQELGKYEQGSGYIPEAPRDGQAYVRKDGEWVLLST
FLGRSLEVLFQGPGSLPETGGGSDYKDDDDKGGGGSGGGGSGGGGSGGGGSGGGGSHHHHHH
SEQ ID NO 131: SEQ ID NO 3 + A942P + A892P + S884C + A893C
MFVFLVLLPLVSSQCVNLTTRTQLPPAYTNSFTRGVYYPDKVFRSSVLHSTQDLFLPFFSNVTWF
HAIHVSGTNGTKRFDNPVLPFNDGVYFASTEKSNIIRGWIFGTTLDSKTQSLLIVNNATNVVIKV
CEFQFCNDPFLGVYYHKNNKSWMESEFRVYSSANNCTFEYVSQPFLMDLEGKQGNFKNLREFVFK
NIDGYFKIYSKHTPINLVRDLPQGFSALEPLVDLPIGINITRFQTLLALHRSYLTPGDSSSGWTA
GAAAYYVGYLQPRTFLLKYNENGTITDAVDCALDPLSETKCTLKSFTVEKGIYQTSNFRVQPTES
IVRFPNITNLCPFGEVFNATRFASVYAWNRKRISNCVADYSVLYNSASFSTFKCYGVSPTKLNDL
CFTNVYADSFVIRGDEVRQIAPGQTGKIADYNYKLPDDFTGCVIAWNSNNLDSKVGGNYNYLYRL
FRKSNLKPFERDISTEIYQAGSTPCNGVEGFNCYFPLQSYGFQPTNGVGYQPYRVVVLSFELLHA
PATVCGPKKSTNLVKNKCVNFNFNGLTGTGVLTESNKKFLPFQQFGRDIADTTDAVRDPQTLEIL
DITPCSFGGVSVITPGTNTSNQVAVLYQDVNCTEVPVAIHADQLTPTWRVYSTGSNVFQTRAGCL
IGAEHVNNSYECDIPIGAGICASYQTQTNSPSRAGSVASQSIIAYTMSLGAENSVAYSNNSIAIP
TNFTISVTTEILPVSMTKTSVDCTMYICGDSTECSNLLLQYGSFCTQLNRALTGIAVEQDKNTQE
VFAQVKQIYKTPPIKDFGGFNFSQILPDPSKPSKRSFIEDLLFNKVTLADAGFIKQYGDCLGDIA
ARDLICAQKFNGLTVLPPLLTDEMIAQYTSALLAGTITCGWTFGAGPCLQIPFAMQMAYRFNGIG
VTQNVLYENQKLIANQFNSAIGKIQDSLSSTPSALGKLQDVVNQNAQALNTLVKQLSSNFGAISS
VLNDILSRLDPPEAEVQIDRLITGRLQSLQTYVTQQLIRAAEIRASANLAATKMSECVLGQSKRV
DFCGKGYHLMSFPQSAPHGVVFLHVTYVPAQEKNFTTAPAICHDGKAHFPREGVFVSNGTHWFVT
QRNFYEPQIITTDNTFVSGNCDVVIGIVNNTVYDPLQPELDSFKEELDKYFKNHTSPDVDLGDIS
GINASVVNIQKEIDRLNEVAKNLNESLIDLQELGKYEQGSGYIPEAPRDGQAYVRKDGEWVLLST
FLGRSLEVLFQGPGSLPETGGGSDYKDDDDKGGGGSGGGGSGGGGSGGGGSGGGGSHHHHHH
SEQ ID NO 132: SEQ ID NO 3 + A942P + D614N + T572I
MFVFLVLLPLVSSQCVNLTTRTQLPPAYTNSFTRGVYYPDKVFRSSVLHSTQDLFLPFFSNVTWF
HAIHVSGTNGTKRFDNPVLPFNDGVYFASTEKSNIIRGWIFGTTLDSKTQSLLIVNNATNVVIKV
CEFQFCNDPFLGVYYHKNNKSWMESEFRVYSSANNCTFEYVSQPFLMDLEGKQGNFKNLREFVFK
NIDGYFKIYSKHTPINLVRDLPQGFSALEPLVDLPIGINITRFQTLLALHRSYLTPGDSSSGWTA
GAAAYYVGYLQPRTFLLKYNENGTITDAVDCALDPLSETKCTLKSFTVEKGIYQTSNFRVQPTES
IVRFPNITNLCPFGEVFNATRFASVYAWNRKRISNCVADYSVLYNSASFSTFKCYGVSPTKLNDL
CFTNVYADSFVIRGDEVRQIAPGQTGKIADYNYKLPDDFTGCVIAWNSNNLDSKVGGNYNYLYRL
FRKSNLKPFERDISTEIYQAGSTPCNGVEGFNCYFPLQSYGFQPTNGVGYQPYRVVVLSFELLHA
PATVCGPKKSTNLVKNKCVNFNFNGLTGTGVLTESNKKFLPFQQFGRDIADITDAVRDPQTLEIL
DITPCSFGGVSVITPGTNTSNQVAVLYQNVNCTEVPVAIHADQLTPTWRVYSTGSNVFQTRAGCL
IGAEHVNNSYECDIPIGAGICASYQTQTNSPSRAGSVASQSIIAYTMSLGAENSVAYSNNSIAIP
TNFTISVTTEILPVSMTKTSVDCTMYICGDSTECSNLLLQYGSFCTQLNRALTGIAVEQDKNTQE
VFAQVKQIYKTPPIKDFGGFNFSQILPDPSKPSKRSFIEDLLFNKVTLADAGFIKQYGDCLGDIA
ARDLICAQKFNGLTVLPPLLTDEMIAQYTSALLAGTITSGWTFGAGAALQIPFAMQMAYRFNGIG
VTQNVLYENQKLIANQFNSAIGKIQDSLSSTPSALGKLQDVVNQNAQALNTLVKQLSSNFGAISS
VLNDILSRLDPPEAEVQIDRLITGRLQSLQTYVTQQLIRAAEIRASANLAATKMSECVLGQSKRV
DFCGKGYHLMSFPQSAPHGVVFLHVTYVPAQEKNFTTAPAICHDGKAHFPREGVFVSNGTHWFVT
QRNFYEPQIITTDNTFVSGNCDVVIGIVNNTVYDPLQPELDSFKEELDKYFKNHTSPDVDLGDIS
GINASVVNIQKEIDRLNEVAKNLNESLIDLQELGKYEQGSGYIPEAPRDGQAYVRKDGEWVLLST
FLGRSLEVLFQGPGSLPETGGGSDYKDDDDKGGGGSGGGGSGGGGSGGGGSGGGGSHHHHHH
SEQ ID NO 133: SEQ ID NO 3 + A942P + D614N + N532P
MFVFLVLLPLVSSQCVNLTTRTQLPPAYTNSFTRGVYYPDKVFRSSVLHSTQDLFLPFFSNVTWF
HAIHVSGTNGTKRFDNPVLPFNDGVYFASTEKSNIIRGWIFGTTLDSKTQSLLIVNNATNVVIKV
CEFQFCNDPFLGVYYHKNNKSWMESEFRVYSSANNCTFEYVSQPFLMDLEGKQGNFKNLREFVFK
NIDGYFKIYSKHTPINLVRDLPQGFSALEPLVDLPIGINITRFQTLLALHRSYLTPGDSSSGWTA
GAAAYYVGYLQPRTFLLKYNENGTITDAVDCALDPLSETKCTLKSFTVEKGIYQTSNFRVQPTES
IVRFPNITNLCPFGEVFNATRFASVYAWNRKRISNCVADYSVLYNSASFSTFKCYGVSPTKLNDL
CFTNVYADSFVIRGDEVRQIAPGQTGKIADYNYKLPDDFTGCVIAWNSNNLDSKVGGNYNYLYRL
FRKSNLKPFERDISTEIYQAGSTPCNGVEGFNCYFPLQSYGFQPTNGVGYQPYRVVVLSFELLHA
PATVCGPKKSTPLVKNKCVNFNFNGLTGTGVLTESNKKFLPFQQFGRDIADTTDAVRDPQTLEIL
DITPCSFGGVSVITPGTNTSNQVAVLYQNVNCTEVPVAIHADQLTPTWRVYSTGSNVFQTRAGCL
IGAEHVNNSYECDIPIGAGICASYQTQTNSPSRAGSVASQSIIAYTMSLGAENSVAYSNNSIAIP
TNFTISVTTEILPVSMTKTSVDCTMYICGDSTECSNLLLQYGSFCTQLNRALTGIAVEQDKNTQE
VFAQVKQIYKTPPIKDFGGFNFSQILPDPSKPSKRSFIEDLLFNKVTLADAGFIKQYGDCLGDIA
ARDLICAQKFNGLTVLPPLLTDEMIAQYTSALLAGTITSGWTFGAGAALQIPFAMQMAYRFNGIG
VTQNVLYENQKLIANQFNSAIGKIQDSLSSTPSALGKLQDVVNQNAQALNTLVKQLSSNFGAISS
VLNDILSRLDPPEAEVQIDRLITGRLQSLQTYVTQQLIRAAEIRASANLAATKMSECVLGQSKRV
DFCGKGYHLMSFPQSAPHGVVFLHVTYVPAQEKNFTTAPAICHDGKAHFPREGVFVSNGTHWFVT
QRNFYEPQIITTDNTFVSGNCDVVIGIVNNTVYDPLQPELDSFKEELDKYFKNHTSPDVDLGDIS
GINASVVNIQKEIDRLNEVAKNLNESLIDLQELGKYEQGSGYIPEAPRDGQAYVRKDGEWVLLST
FLGRSLEVLFQGPGSLPETGGGSDYKDDDDKGGGGSGGGGSGGGGSGGGGSGGGGSHHHHHH
SEQ ID NO 134: SEQ ID NO 3 + A942P + D614N + G880C + F888C
MFVFLVLLPLVSSQCVNLTTRTQLPPAYTNSFTRGVYYPDKVFRSSVLHSTQDLFLPFFSNVTWF
HAIHVSGTNGTKRFDNPVLPFNDGVYFASTEKSNIIRGWIFGTTLDSKTQSLLIVNNATNVVIKV
CEFQFCNDPFLGVYYHKNNKSWMESEFRVYSSANNCTFEYVSQPFLMDLEGKQGNFKNLREFVFK
NIDGYFKIYSKHTPINLVRDLPQGFSALEPLVDLPIGINITRFQTLLALHRSYLTPGDSSSGWTA
GAAAYYVGYLQPRTFLLKYNENGTITDAVDCALDPLSETKCTLKSFTVEKGIYQTSNFRVQPTES
IVRFPNITNLCPFGEVFNATRFASVYAWNRKRISNCVADYSVLYNSASFSTFKCYGVSPTKLNDL
CFTNVYADSFVIRGDEVRQIAPGQTGKIADYNYKLPDDFTGCVIAWNSNNLDSKVGGNYNYLYRL
FRKSNLKPFERDISTEIYQAGSTPCNGVEGFNCYFPLQSYGFQPTNGVGYQPYRVVVLSFELLHA
PATVCGPKKSTNLVKNKCVNFNFNGLTGTGVLTESNKKFLPFQQFGRDIADTTDAVRDPQTLEIL
DITPCSFGGVSVITPGTNTSNQVAVLYQNVNCTEVPVAIHADQLTPTWRVYSTGSNVFQTRAGCL
IGAEHVNNSYECDIPIGAGICASYQTQTNSPSRAGSVASQSIIAYTMSLGAENSVAYSNNSIAIP
TNFTISVTTEILPVSMTKTSVDCTMYICGDSTECSNLLLQYGSFCTQLNRALTGIAVEQDKNTQE
VFAQVKQIYKTPPIKDFGGFNFSQILPDPSKPSKRSFIEDLLFNKVTLADAGFIKQYGDCLGDIA
ARDLICAQKFNGLTVLPPLLTDEMIAQYTSALLACTITSGWTCGAGAALQIPFAMQMAYRFNGIG
VTQNVLYENQKLIANQFNSAIGKIQDSLSSTPSALGKLQDVVNQNAQALNTLVKQLSSNFGAISS
VLNDILSRLDPPEAEVQIDRLITGRLQSLQTYVTQQLIRAAEIRASANLAATKMSECVLGQSKRV
DFCGKGYHLMSFPQSAPHGVVFLHVTYVPAQEKNFTTAPAICHDGKAHFPREGVFVSNGTHWFVT
QRNFYEPQIITTDNTFVSGNCDVVIGIVNNTVYDPLQPELDSFKEELDKYFKNHTSPDVDLGDIS
GINASVVNIQKEIDRLNEVAKNLNESLIDLQELGKYEQGSGYIPEAPRDGQAYVRKDGEWVLLST
FLGRSLEVLFQGPGSLPETGGGSDYKDDDDKGGGGSGGGGSGGGGSGGGGSGGGGSHHHHHH
SEQ ID NO 135: SEQ ID NO 3 + A942P + D614N + S884C + A893C
MFVFLVLLPLVSSQCVNLTTRTQLPPAYTNSFTRGVYYPDKVFRSSVLHSTQDLFLPFFSNVTWF
HAIHVSGTNGTKRFDNPVLPFNDGVYFASTEKSNIIRGWIFGTTLDSKTQSLLIVNNATNVVIKV
CEFQFCNDPFLGVYYHKNNKSWMESEFRVYSSANNCTFEYVSQPFLMDLEGKQGNFKNLREFVFK
NIDGYFKIYSKHTPINLVRDLPQGFSALEPLVDLPIGINITRFQTLLALHRSYLTPGDSSSGWTA
GAAAYYVGYLQPRTFLLKYNENGTITDAVDCALDPLSETKCTLKSFTVEKGIYQTSNFRVQPTES
IVRFPNITNLCPFGEVFNATRFASVYAWNRKRISNCVADYSVLYNSASFSTFKCYGVSPTKLNDL
CFTNVYADSFVIRGDEVRQIAPGQTGKIADYNYKLPDDFTGCVIAWNSNNLDSKVGGNYNYLYRL
FRKSNLKPFERDISTEIYQAGSTPCNGVEGFNCYFPLQSYGFQPTNGVGYQPYRVVVLSFELLHA
PATVCGPKKSTNLVKNKCVNFNFNGLTGTGVLTESNKKFLPFQQFGRDIADTTDAVRDPQTLEIL
DITPCSFGGVSVITPGTNTSNQVAVLYQNVNCTEVPVAIHADQLTPTWRVYSTGSNVFQTRAGCL
IGAEHVNNSYECDIPIGAGICASYQTQTNSPSRAGSVASQSIIAYTMSLGAENSVAYSNNSIAIP
TNFTISVTTEILPVSMTKTSVDCTMYICGDSTECSNLLLQYGSFCTQLNRALTGIAVEQDKNTQE
VFAQVKQIYKTPPIKDFGGFNFSQILPDPSKPSKRSFIEDLLFNKVTLADAGFIKQYGDCLGDIA
ARDLICAQKFNGLTVLPPLLTDEMIAQYTSALLAGTITCGWTFGAGACLQIPFAMQMAYRFNGIG
VTQNVLYENQKLIANQFNSAIGKIQDSLSSTPSALGKLQDVVNQNAQALNTLVKQLSSNFGAISS
VLNDILSRLDPPEAEVQIDRLITGRLQSLQTYVTQQLIRAAEIRASANLAATKMSECVLGQSKRV
DFCGKGYHLMSFPQSAPHGVVFLHVTYVPAQEKNFTTAPAICHDGKAHFPREGVFVSNGTHWFVT
QRNFYEPQIITTDNTFVSGNCDVVIGIVNNTVYDPLQPELDSFKEELDKYFKNHTSPDVDLGDIS
GINASVVNIQKEIDRLNEVAKNLNESLIDLQELGKYEQGSGYIPEAPRDGQAYVRKDGEWVLLST
FLGRSLEVLFQGPGSLPETGGGSDYKDDDDKGGGGSGGGGSGGGGSGGGGSGGGGSHHHHHH
SEQ ID NO 136: SEQ ID NO 3 + A942P + T572I +
N532P
MFVFLVLLPLVSSQCVNLTTRTQLPPAYTNSFTRGVYYPDKVFRSSVLHSTQDLFLPFFSNVTWF
HAIHVSGTNGTKRFDNPVLPFNDGVYFASTEKSNIIRGWIFGTTLDSKTQSLLIVNNATNVVIKV
CEFQFCNDPFLGVYYHKNNKSWMESEFRVYSSANNCTFEYVSQPFLMDLEGKQGNFKNLREFVFK
NIDGYFKIYSKHTPINLVRDLPQGFSALEPLVDLPIGINITRFQTLLALHRSYLTPGDSSSGWTA
GAAAYYVGYLQPRTFLLKYNENGTITDAVDCALDPLSETKCTLKSFTVEKGIYQTSNFRVQPTES
IVRFPNITNLCPFGEVFNATRFASVYAWNRKRISNCVADYSVLYNSASFSTFKCYGVSPTKLNDL
CFTNVYADSFVIRGDEVRQIAPGQTGKIADYNYKLPDDFTGCVIAWNSNNLDSKVGGNYNYLYRL
FRKSNLKPFERDISTEIYQAGSTPCNGVEGFNCYFPLQSYGFQPTNGVGYQPYRVVVLSFELLHA
PATVCGPKKSTPLVKNKCVNFNFNGLTGTGVLTESNKKFLPFQQFGRDIADITDAVRDPQTLEIL
DITPCSFGGVSVITPGTNTSNQVAVLYQDVNCTEVPVAIHADQLTPTWRVYSTGSNVFQTRAGCL
IGAEHVNNSYECDIPIGAGICASYQTQTNSPSRAGSVASQSIIAYTMSLGAENSVAYSNNSIAIP
TNFTISVTTEILPVSMTKTSVDCTMYICGDSTECSNLLLQYGSFCTQLNRALTGIAVEQDKNTQE
VFAQVKQIYKTPPIKDFGGFNFSQILPDPSKPSKRSFIEDLLFNKVTLADAGFIKQYGDCLGDIA
ARDLICAQKFNGLTVLPPLLTDEMIAQYTSALLAGTITSGWTFGAGAALQIPFAMQMAYRFNGIG
VTQNVLYENQKLIANQFNSAIGKIQDSLSSTPSALGKLQDVVNQNAQALNTLVKQLSSNFGAISS
VLNDILSRLDPPEAEVQIDRLITGRLQSLQTYVTQQLIRAAEIRASANLAATKMSECVLGQSKRV
DFCGKGYHLMSFPQSAPHGVVFLHVTYVPAQEKNFTTAPAICHDGKAHFPREGVFVSNGTHWFVT
QRNFYEPQIITTDNTFVSGNCDVVIGIVNNTVYDPLQPELDSFKEELDKYFKNHTSPDVDLGDIS
GINASVVNIQKEIDRLNEVAKNLNESLIDLQELGKYEQGSGYIPEAPRDGQAYVRKDGEWVLLST
FLGRSLEVLFQGPGSLPETGGGSDYKDDDDKGGGGSGGGGSGGGGSGGGGSGGGGSHHHHHH
SEQ ID NO 137: SEQ ID NO 3 + A942P + T572I +
G880C + F888C
MFVFLVLLPLVSSQCVNLTTRTQLPPAYTNSFTRGVYYPDKVFRSSVLHSTQDLFLPFFSNVTWF
HAIHVSGTNGTKRFDNPVLPFNDGVYFASTEKSNIIRGWIFGTTLDSKTQSLLIVNNATNVVIKV
CEFQFCNDPFLGVYYHKNNKSWMESEFRVYSSANNCTFEYVSQPFLMDLEGKQGNFKNLREFVFK
NIDGYFKIYSKHTPINLVRDLPQGFSALEPLVDLPIGINITRFQTLLALHRSYLTPGDSSSGWTA
GAAAYYVGYLQPRTFLLKYNENGTITDAVDCALDPLSETKCTLKSFTVEKGIYQTSNFRVQPTES
IVRFPNITNLCPFGEVFNATRFASVYAWNRKRISNCVADYSVLYNSASFSTFKCYGVSPTKLNDL
CFTNVYADSFVIRGDEVRQIAPGQTGKIADYNYKLPDDFTGCVIAWNSNNLDSKVGGNYNYLYRL
FRKSNLKPFERDISTEIYQAGSTPCNGVEGFNCYFPLQSYGFQPTNGVGYQPYRVVVLSFELLHA
PATVCGPKKSTNLVKNKCVNFNFNGLTGTGVLTESNKKFLPFQQFGRDIADITDAVRDPQTLEIL
DITPCSFGGVSVITPGTNTSNQVAVLYQDVNCTEVPVAIHADQLTPTWRVYSTGSNVFQTRAGCL
IGAEHVNNSYECDIPIGAGICASYQTQTNSPSRAGSVASQSIIAYTMSLGAENSVAYSNNSIAIP
TNFTISVTTEILPVSMTKTSVDCTMYICGDSTECSNLLLQYGSFCTQLNRALTGIAVEQDKNTQE
VFAQVKQIYKTPPIKDFGGFNFSQILPDPSKPSKRSFIEDLLFNKVTLADAGFIKQYGDCLGDIA
ARDLICAQKFNGLTVLPPLLTDEMIAQYTSALLACTITSGWTCGAGAALQIPFAMQMAYRFNGIG
VTQNVLYENQKLIANQFNSAIGKIQDSLSSTPSALGKLQDVVNQNAQALNTLVKQLSSNFGAISS
VLNDILSRLDPPEAEVQIDRLITGRLQSLQTYVTQQLIRAAEIRASANLAATKMSECVLGQSKRV
DFCGKGYHLMSFPQSAPHGVVFLHVTYVPAQEKNFTTAPAICHDGKAHFPREGVFVSNGTHWFVT
QRNFYEPQIITTDNTFVSGNCDVVIGIVNNTVYDPLQPELDSFKEELDKYFKNHTSPDVDLGDIS
GINASVVNIQKEIDRLNEVAKNLNESLIDLQELGKYEQGSGYIPEAPRDGQAYVRKDGEWVLLST
FLGRSLEVLFQGPGSLPETGGGSDYKDDDDKGGGGSGGGGSGGGGSGGGGSGGGGSHHHHHH
SEQ ID NO 138: SEQ ID NO 3 + A942P + T572I +
S884C + A893C
MFVFLVLLPLVSSQCVNLTTRTQLPPAYTNSFTRGVYYPDKVFRSSVLHSTQDLFLPFFSNVTWF
HAIHVSGTNGTKRFDNPVLPFNDGVYFASTEKSNIIRGWIFGTTLDSKTQSLLIVNNATNVVIKV
CEFQFCNDPFLGVYYHKNNKSWMESEFRVYSSANNCTFEYVSQPFLMDLEGKQGNFKNLREFVFK
NIDGYFKIYSKHTPINLVRDLPQGFSALEPLVDLPIGINITRFQTLLALHRSYLTPGDSSSGWTA
GAAAYYVGYLQPRTFLLKYNENGTITDAVDCALDPLSETKCTLKSFTVEKGIYQTSNFRVQPTES
IVRFPNITNLCPFGEVFNATRFASVYAWNRKRISNCVADYSVLYNSASFSTFKCYGVSPTKLNDL
CFTNVYADSFVIRGDEVRQIAPGQTGKIADYNYKLPDDFTGCVIAWNSNNLDSKVGGNYNYLYRL
FRKSNLKPFERDISTEIYQAGSTPCNGVEGFNCYFPLQSYGFQPTNGVGYQPYRVVVLSFELLHA
PATVCGPKKSTNLVKNKCVNFNFNGLTGTGVLTESNKKFLPFQQFGRDIADITDAVRDPQTLEIL
DITPCSFGGVSVITPGTNTSNQVAVLYQDVNCTEVPVAIHADQLTPTWRVYSTGSNVFQTRAGCL
IGAEHVNNSYECDIPIGAGICASYQTQTNSPSRAGSVASQSIIAYTMSLGAENSVAYSNNSIAIP
TNFTISVTTEILPVSMTKTSVDCTMYICGDSTECSNLLLQYGSFCTQLNRALTGIAVEQDKNTQE
VFAQVKQIYKTPPIKDFGGFNFSQILPDPSKPSKRSFIEDLLFNKVTLADAGFIKQYGDCLGDIA
ARDLICAQKFNGLTVLPPLLTDEMIAQYTSALLAGTITCGWTFGAGACLQIPFAMQMAYRFNGIG
VTQNVLYENQKLIANQFNSAIGKIQDSLSSTPSALGKLQDVVNQNAQALNTLVKQLSSNFGAISS
VLNDILSRLDPPEAEVQIDRLITGRLQSLQTYVTQQLIRAAEIRASANLAATKMSECVLGQSKRV
DFCGKGYHLMSFPQSAPHGVVFLHVTYVPAQEKNFTTAPAICHDGKAHFPREGVFVSNGTHWFVT
QRNFYEPQIITTDNTFVSGNCDVVIGIVNNTVYDPLQPELDSFKEELDKYFKNHTSPDVDLGDIS
GINASVVNIQKEIDRLNEVAKNLNESLIDLQELGKYEQGSGYIPEAPRDGQAYVRKDGEWVLLST
FLGRSLEVLFQGPGSLPETGGGSDYKDDDDKGGGGSGGGGSGGGGSGGGGSGGGGSHHHHHH
SEQ ID NO 139: SEQ ID NO 3 + A942P + N532P + G880C + F888C
MFVFLVLLPLVSSQCVNLTTRTQLPPAYTNSFTRGVYYPDKVFRSSVLHSTQDLFLPFFSNVTWF
HAIHVSGTNGTKRFDNPVLPFNDGVYFASTEKSNIIRGWIFGTTLDSKTQSLLIVNNATNVVIKV
CEFQFCNDPFLGVYYHKNNKSWMESEFRVYSSANNCTFEYVSQPFLMDLEGKQGNFKNLREFVFK
NIDGYFKIYSKHTPINLVRDLPQGFSALEPLVDLPIGINITRFQTLLALHRSYLTPGDSSSGWTA
GAAAYYVGYLQPRTFLLKYNENGTITDAVDCALDPLSETKCTLKSFTVEKGIYQTSNFRVQPTES
IVRFPNITNLCPFGEVFNATRFASVYAWNRKRISNCVADYSVLYNSASFSTFKCYGVSPTKLNDL
CFTNVYADSFVIRGDEVRQIAPGQTGKIADYNYKLPDDFTGCVIAWNSNNLDSKVGGNYNYLYRL
FRKSNLKPFERDISTEIYQAGSTPCNGVEGFNCYFPLQSYGFQPTNGVGYQPYRVVVLSFELLHA
PATVCGPKKSTPLVKNKCVNFNFNGLTGTGVLTESNKKFLPFQQFGRDIADTTDAVRDPQTLEIL
DITPCSFGGVSVITPGTNTSNQVAVLYQDVNCTEVPVAIHADQLTPTWRVYSTGSNVFQTRAGCL
IGAEHVNNSYECDIPIGAGICASYQTQTNSPSRAGSVASQSIIAYTMSLGAENSVAYSNNSIAIP
TNFTISVTTEILPVSMTKTSVDCTMYICGDSTECSNLLLQYGSFCTQLNRALTGIAVEQDKNTQE
VFAQVKQIYKTPPIKDFGGFNFSQILPDPSKPSKRSFIEDLLFNKVTLADAGFIKQYGDCLGDIA
ARDLICAQKFNGLTVLPPLLTDEMIAQYTSALLACTITSGWTCGAGAALQIPFAMQMAYRFNGIG
VTQNVLYENQKLIANQFNSAIGKIQDSLSSTPSALGKLQDVVNQNAQALNTLVKQLSSNFGAISS
VLNDILSRLDPPEAEVQIDRLITGRLQSLQTYVTQQLIRAAEIRASANLAATKMSECVLGQSKRV
DFCGKGYHLMSFPQSAPHGVVFLHVTYVPAQEKNFTTAPAICHDGKAHFPREGVFVSNGTHWFVT
QRNFYEPQIITTDNTFVSGNCDVVIGIVNNTVYDPLQPELDSFKEELDKYFKNHTSPDVDLGDIS
GINASVVNIQKEIDRLNEVAKNLNESLIDLQELGKYEQGSGYIPEAPRDGQAYVRKDGEWVLLST
FLGRSLEVLFQGPGSLPETGGGSDYKDDDDKGGGGSGGGGSGGGGSGGGGSGGGGSHHHHHH
SEQ ID NO 140: SEQ ID NO 3 + A942P + N532P + S884C + A893C
MFVFLVLLPLVSSQCVNLTTRTQLPPAYTNSFTRGVYYPDKVFRSSVLHSTQDLFLPFFSNVTWF
HAIHVSGTNGTKRFDNPVLPFNDGVYFASTEKSNIIRGWIFGTTLDSKTQSLLIVNNATNVVIKV
CEFQFCNDPFLGVYYHKNNKSWMESEFRVYSSANNCTFEYVSQPFLMDLEGKQGNFKNLREFVFK
NIDGYFKIYSKHTPINLVRDLPQGFSALEPLVDLPIGINITRFQTLLALHRSYLTPGDSSSGWTA
GAAAYYVGYLQPRTFLLKYNENGTITDAVDCALDPLSETKCTLKSFTVEKGIYQTSNFRVQPTES
IVRFPNITNLCPFGEVFNATRFASVYAWNRKRISNCVADYSVLYNSASFSTFKCYGVSPTKLNDL
CFTNVYADSFVIRGDEVRQIAPGQTGKIADYNYKLPDDFTGCVIAWNSNNLDSKVGGNYNYLYRL
FRKSNLKPFERDISTEIYQAGSTPCNGVEGFNCYFPLQSYGFQPTNGVGYQPYRVVVLSFELLHA
PATVCGPKKSTPLVKNKCVNFNFNGLTGTGVLTESNKKFLPFQQFGRDIADTTDAVRDPQTLEIL
DITPCSFGGVSVITPGTNTSNQVAVLYQDVNCTEVPVAIHADQLTPTWRVYSTGSNVFQTRAGCL
IGAEHVNNSYECDIPIGAGICASYQTQTNSPSRAGSVASQSIIAYTMSLGAENSVAYSNNSIAIP
TNFTISVTTEILPVSMTKTSVDCTMYICGDSTECSNLLLQYGSFCTQLNRALTGIAVEQDKNTQE
VFAQVKQIYKTPPIKDFGGFNFSQILPDPSKPSKRSFIEDLLFNKVTLADAGFIKQYGDCLGDIA
ARDLICAQKFNGLTVLPPLLTDEMIAQYTSALLAGTITCGWTFGAGACLQIPFAMQMAYRFNGIG
VTQNVLYENQKLIANQFNSAIGKIQDSLSSTPSALGKLQDVVNQNAQALNTLVKQLSSNFGAISS
VLNDILSRLDPPEAEVQIDRLITGRLQSLQTYVTQQLIRAAEIRASANLAATKMSECVLGQSKRV
DFCGKGYHLMSFPQSAPHGVVFLHVTYVPAQEKNFTTAPAICHDGKAHFPREGVFVSNGTHWFVT
QRNFYEPQIITTDNTFVSGNCDVVIGIVNNTVYDPLQPELDSFKEELDKYFKNHTSPDVDLGDIS
GINASVVNIQKEIDRLNEVAKNLNESLIDLQELGKYEQGSGYIPEAPRDGQAYVRKDGEWVLLST
FLGRSLEVLFQGPGSLPETGGGSDYKDDDDKGGGGSGGGGSGGGGSGGGGSGGGGSHHHHHH
SEQ ID NO 141: SEQ ID NO 3 + A892P + D614N + T572I
MFVFLVLLPLVSSQCVNLTTRTQLPPAYTNSFTRGVYYPDKVFRSSVLHSTQDLFLPFFSNVTWF
HAIHVSGTNGTKRFDNPVLPFNDGVYFASTEKSNIIRGWIFGTTLDSKTQSLLIVNNATNVVIKV
CEFQFCNDPFLGVYYHKNNKSWMESEFRVYSSANNCTFEYVSQPFLMDLEGKQGNFKNLREFVFK
NIDGYFKIYSKHTPINLVRDLPQGFSALEPLVDLPIGINITRFQTLLALHRSYLTPGDSSSGWTA
GAAAYYVGYLQPRTFLLKYNENGTITDAVDCALDPLSETKCTLKSFTVEKGIYQTSNFRVQPTES
IVRFPNITNLCPFGEVFNATRFASVYAWNRKRISNCVADYSVLYNSASFSTFKCYGVSPTKLNDL
CFTNVYADSFVIRGDEVRQIAPGQTGKIADYNYKLPDDFTGCVIAWNSNNLDSKVGGNYNYLYRL
FRKSNLKPFERDISTEIYQAGSTPCNGVEGFNCYFPLQSYGFQPTNGVGYQPYRVVVLSFELLHA
PATVCGPKKSTNLVKNKCVNFNFNGLTGTGVLTESNKKFLPFQQFGRDIADITDAVRDPQTLEIL
DITPCSFGGVSVITPGTNTSNQVAVLYQNVNCTEVPVAIHADQLTPTWRVYSTGSNVFQTRAGCL
IGAEHVNNSYECDIPIGAGICASYQTQTNSPSRAGSVASQSIIAYTMSLGAENSVAYSNNSIAIP
TNFTISVTTEILPVSMTKTSVDCTMYICGDSTECSNLLLQYGSFCTQLNRALTGIAVEQDKNTQE
VFAQVKQIYKTPPIKDFGGFNFSQILPDPSKPSKRSFIEDLLFNKVTLADAGFIKQYGDCLGDIA
ARDLICAQKFNGLTVLPPLLTDEMIAQYTSALLAGTITSGWTFGAGPALQIPFAMQMAYRFNGIG
VTQNVLYENQKLIANQFNSAIGKIQDSLSSTASALGKLQDVVNQNAQALNTLVKQLSSNFGAISS
VLNDILSRLDPPEAEVQIDRLITGRLQSLQTYVTQQLIRAAEIRASANLAATKMSECVLGQSKRV
DFCGKGYHLMSFPQSAPHGVVFLHVTYVPAQEKNFTTAPAICHDGKAHFPREGVFVSNGTHWFVT
QRNFYEPQIITTDNTFVSGNCDVVIGIVNNTVYDPLQPELDSFKEELDKYFKNHTSPDVDLGDIS
GINASVVNIQKEIDRLNEVAKNLNESLIDLQELGKYEQGSGYIPEAPRDGQAYVRKDGEWVLLST
FLGRSLEVLFQGPGSLPETGGGSDYKDDDDKGGGGSGGGGSGGGGSGGGGSGGGGSHHHHHH
SEQ ID NO 142: SEQ ID NO 3 + A892P + D614N + N532P
MFVFLVLLPLVSSQCVNLTTRTQLPPAYTNSFTRGVYYPDKVFRSSVLHSTQDLFLPFFSNVTWF
HAIHVSGTNGTKRFDNPVLPFNDGVYFASTEKSNIIRGWIFGTTLDSKTQSLLIVNNATNVVIKV
CEFQFCNDPFLGVYYHKNNKSWMESEFRVYSSANNCTFEYVSQPFLMDLEGKQGNFKNLREFVFK
NIDGYFKIYSKHTPINLVRDLPQGFSALEPLVDLPIGINITRFQTLLALHRSYLTPGDSSSGWTA
GAAAYYVGYLQPRTFLLKYNENGTITDAVDCALDPLSETKCTLKSFTVEKGIYQTSNFRVQPTES
IVRFPNITNLCPFGEVFNATRFASVYAWNRKRISNCVADYSVLYNSASFSTFKCYGVSPTKLNDL
CFTNVYADSFVIRGDEVRQIAPGQTGKIADYNYKLPDDFTGCVIAWNSNNLDSKVGGNYNYLYRL
FRKSNLKPFERDISTEIYQAGSTPCNGVEGFNCYFPLQSYGFQPTNGVGYQPYRVVVLSFELLHA
PATVCGPKKSTPLVKNKCVNFNFNGLTGTGVLTESNKKFLPFQQFGRDIADTTDAVRDPQTLEIL
DITPCSFGGVSVITPGTNTSNQVAVLYQNVNCTEVPVAIHADQLTPTWRVYSTGSNVFQTRAGCL
IGAEHVNNSYECDIPIGAGICASYQTQTNSPSRAGSVASQSIIAYTMSLGAENSVAYSNNSIAIP
TNFTISVTTEILPVSMTKTSVDCTMYICGDSTECSNLLLQYGSFCTQLNRALTGIAVEQDKNTQE
VFAQVKQIYKTPPIKDFGGFNFSQILPDPSKPSKRSFIEDLLFNKVTLADAGFIKQYGDCLGDIA
ARDLICAQKFNGLTVLPPLLTDEMIAQYTSALLAGTITSGWTFGAGPALQIPFAMQMAYRFNGIG
VTQNVLYENQKLIANQFNSAIGKIQDSLSSTASALGKLQDVVNQNAQALNTLVKQLSSNFGAISS
VLNDILSRLDPPEAEVQIDRLITGRLQSLQTYVTQQLIRAAEIRASANLAATKMSECVLGQSKRV
DFCGKGYHLMSFPQSAPHGVVFLHVTYVPAQEKNFTTAPAICHDGKAHFPREGVFVSNGTHWFVT
QRNFYEPQIITTDNTFVSGNCDVVIGIVNNTVYDPLQPELDSFKEELDKYFKNHTSPDVDLGDIS
GINASVVNIQKEIDRLNEVAKNLNESLIDLQELGKYEQGSGYIPEAPRDGQAYVRKDGEWVLLST
FLGRSLEVLFQGPGSLPETGGGSDYKDDDDKGGGGSGGGGSGGGGSGGGGSGGGGSHHHHHH
SEQ ID NO 143: SEQ ID NO 3 + A892P + D614N + G880C + F888C
MFVFLVLLPLVSSQCVNLTTRTQLPPAYTNSFTRGVYYPDKVFRSSVLHSTQDLFLPFFSNVTWF
HAIHVSGTNGTKRFDNPVLPFNDGVYFASTEKSNIIRGWIFGTTLDSKTQSLLIVNNATNVVIKV
CEFQFCNDPFLGVYYHKNNKSWMESEFRVYSSANNCTFEYVSQPFLMDLEGKQGNFKNLREFVFK
NIDGYFKIYSKHTPINLVRDLPQGFSALEPLVDLPIGINITRFQTLLALHRSYLTPGDSSSGWTA
GAAAYYVGYLQPRTFLLKYNENGTITDAVDCALDPLSETKCTLKSFTVEKGIYQTSNFRVQPTES
IVRFPNITNLCPFGEVFNATRFASVYAWNRKRISNCVADYSVLYNSASFSTFKCYGVSPTKLNDL
CFTNVYADSFVIRGDEVRQIAPGQTGKIADYNYKLPDDFTGCVIAWNSNNLDSKVGGNYNYLYRL
FRKSNLKPFERDISTEIYQAGSTPCNGVEGFNCYFPLQSYGFQPTNGVGYQPYRVVVLSFELLHA
PATVCGPKKSTNLVKNKCVNFNFNGLTGTGVLTESNKKFLPFQQFGRDIADTTDAVRDPQTLEIL
DITPCSFGGVSVITPGTNTSNQVAVLYQNVNCTEVPVAIHADQLTPTWRVYSTGSNVFQTRAGCL
IGAEHVNNSYECDIPIGAGICASYQTQTNSPSRAGSVASQSIIAYTMSLGAENSVAYSNNSIAIP
TNFTISVTTEILPVSMTKTSVDCTMYICGDSTECSNLLLQYGSFCTQLNRALTGIAVEQDKNTQE
VFAQVKQIYKTPPIKDFGGFNFSQILPDPSKPSKRSFIEDLLFNKVTLADAGFIKQYGDCLGDIA
ARDLICAQKFNGLTVLPPLLTDEMIAQYTSALLACTITSGWTCGAGPALQIPFAMQMAYRFNGIG
VTQNVLYENQKLIANQFNSAIGKIQDSLSSTASALGKLQDVVNQNAQALNTLVKQLSSNFGAISS
VLNDILSRLDPPEAEVQIDRLITGRLQSLQTYVTQQLIRAAEIRASANLAATKMSECVLGQSKRV
DFCGKGYHLMSFPQSAPHGVVFLHVTYVPAQEKNFTTAPAICHDGKAHFPREGVFVSNGTHWFVT
QRNFYEPQIITTDNTFVSGNCDVVIGIVNNTVYDPLQPELDSFKEELDKYFKNHTSPDVDLGDIS
GINASVVNIQKEIDRLNEVAKNLNESLIDLQELGKYEQGSGYIPEAPRDGQAYVRKDGEWVLLST
FLGRSLEVLFQGPGSLPETGGGSDYKDDDDKGGGGSGGGGGGGGSGGGGSGGGGSHHHHHH
SEQ ID NO 144: SEQ ID NO 3 + A892P + D614N + S884C + A893C
MFVFLVLLPLVSSQCVNLTTRTQLPPAYTNSFTRGVYYPDKVFRSSVLHSTQDLFLPFFSNVTWF
HAIHVSGTNGTKRFDNPVLPFNDGVYFASTEKSNIIRGWIFGTTLDSKTQSLLIVNNATNVVIKV
CEFQFCNDPFLGVYYHKNNKSWMESEFRVYSSANNCTFEYVSQPFLMDLEGKQGNFKNLREFVFK
NIDGYFKIYSKHTPINLVRDLPQGFSALEPLVDLPIGINITRFQTLLALHRSYLTPGDSSSGWTA
GAAAYYVGYLQPRTFLLKYNENGTITDAVDCALDPLSETKCTLKSFTVEKGIYQTSNFRVQPTES
IVRFPNITNLCPFGEVFNATRFASVYAWNRKRISNCVADYSVLYNSASFSTFKCYGVSPTKLNDL
CFTNVYADSFVIRGDEVRQIAPGQTGKIADYNYKLPDDFTGCVIAWNSNNLDSKVGGNYNYLYRL
FRKSNLKPFERDISTEIYQAGSTPCNGVEGFNCYFPLQSYGFQPTNGVGYQPYRVVVLSFELLHA
PATVCGPKKSTNLVKNKCVNFNFNGLTGTGVLTESNKKFLPFQQFGRDIADTTDAVRDPQTLEIL
DITPCSFGGVSVITPGTNTSNQVAVLYQNVNCTEVPVAIHADQLTPTWRVYSTGSNVFQTRAGCL
IGAEHVNNSYECDIPIGAGICASYQTQTNSPSRAGSVASQSIIAYTMSLGAENSVAYSNNSIAIP
TNFTISVTTEILPVSMTKTSVDCTMYICGDSTECSNLLLQYGSFCTQLNRALTGIAVEQDKNTQE
VFAQVKQIYKTPPIKDFGGFNFSQILPDPSKPSKRSFIEDLLFNKVTLADAGFIKQYGDCLGDIA
ARDLICAQKFNGLTVLPPLLTDEMIAQYTSALLAGTITCGWTFGAGPCLQIPFAMQMAYRFNGIG
VTQNVLYENQKLIANQFNSAIGKIQDSLSSTASALGKLQDVVNQNAQALNTLVKQLSSNFGAISS
VLNDILSRLDPPEAEVQIDRLITGRLQSLQTYVTQQLIRAAEIRASANLAATKMSECVLGQSKRV
DFCGKGYHLMSFPQSAPHGVVFLHVTYVPAQEKNFTTAPAICHDGKAHFPREGVFVSNGTHWFVT
QRNFYEPQIITTDNTFVSGNCDVVIGIVNNTVYDPLQPELDSFKEELDKYFKNHTSPDVDLGDIS
GINASVVNIQKEIDRLNEVAKNLNESLIDLQELGKYEQGSGYIPEAPRDGQAYVRKDGEWVLLST
FLGRSLEVLFQGPGSLPETGGGSDYKDDDDKGGGGGGGGSGGGGSGGGGSGGGGSHHHHHH
SEQ ID NO 145: SEQ ID NO 3 + A892P + T572I +
N532P
MFVFLVLLPLVSSQCVNLTTRTQLPPAYTNSFTRGVYYPDKVFRSSVLHSTQDLFLPFFSNVTWF
HAIHVSGTNGTKRFDNPVLPFNDGVYFASTEKSNIIRGWIFGTTLDSKTQSLLIVNNATNVVIKV
CEFQFCNDPFLGVYYHKNNKSWMESEFRVYSSANNCTFEYVSQPFLMDLEGKQGNFKNLREFVFK
NIDGYFKIYSKHTPINLVRDLPQGFSALEPLVDLPIGINITRFQTLLALHRSYLTPGDSSSGWTA
GAAAYYVGYLQPRTFLLKYNENGTITDAVDCALDPLSETKCTLKSFTVEKGIYQTSNFRVQPTES
IVRFPNITNLCPFGEVFNATRFASVYAWNRKRISNCVADYSVLYNSASFSTFKCYGVSPTKLNDL
CFTNVYADSFVIRGDEVRQIAPGQTGKIADYNYKLPDDFTGCVIAWNSNNLDSKVGGNYNYLYRL
FRKSNLKPFERDISTEIYQAGSTPCNGVEGFNCYFPLQSYGFQPTNGVGYQPYRVVVLSFELLHA
PATVCGPKKSTPLVKNKCVNFNFNGLTGTGVLTESNKKFLPFQQFGRDIADITDAVRDPQTLEIL
DITPCSFGGVSVITPGTNTSNQVAVLYQDVNCTEVPVAIHADQLTPTWRVYSTGSNVFQTRAGCL
IGAEHVNNSYECDIPIGAGICASYQTQTNSPSRAGSVASQSIIAYTMSLGAENSVAYSNNSIAIP
TNFTISVTTEILPVSMTKTSVDCTMYICGDSTECSNLLLQYGSFCTQLNRALTGIAVEQDKNTQE
VFAQVKQIYKTPPIKDFGGFNFSQILPDPSKPSKRSFIEDLLFNKVTLADAGFIKQYGDCLGDIA
ARDLICAQKFNGLTVLPPLLTDEMIAQYTSALLAGTITSGWTFGAGPALQIPFAMQMAYRFNGIG
VTQNVLYENQKLIANQFNSAIGKIQDSLSSTASALGKLQDVVNQNAQALNTLVKQLSSNFGAISS
VLNDILSRLDPPEAEVQIDRLITGRLQSLQTYVTQQLIRAAEIRASANLAATKMSECVLGQSKRV
DFCGKGYHLMSFPQSAPHGVVFLHVTYVPAQEKNFTTAPAICHDGKAHFPREGVFVSNGTHWFVT
QRNFYEPQIITTDNTFVSGNCDVVIGIVNNTVYDPLQPELDSFKEELDKYFKNHTSPDVDLGDIS
GINASVVNIQKEIDRLNEVAKNLNESLIDLQELGKYEQGSGYIPEAPRDGQAYVRKDGEWVLLST
FLGRSLEVLFQGPGSLPETGGGSDYKDDDDKGGGGSGGGGSGGGGSGGGGSGGGGSHHHHHH
SEQ ID NO 146: SEQ ID NO 3 + A892P + T572I +
G880C + F888C
MFVFLVLLPLVSSQCVNLTTRTQLPPAYTNSFTRGVYYPDKVFRSSVLHSTQDLFLPFFSNVTWF
HAIHVSGTNGTKRFDNPVLPFNDGVYFASTEKSNIIRGWIFGTTLDSKTQSLLIVNNATNVVIKV
CEFQFCNDPFLGVYYHKNNKSWMESEFRVYSSANNCTFEYVSQPFLMDLEGKQGNFKNLREFVFK
NIDGYFKIYSKHTPINLVRDLPQGFSALEPLVDLPIGINITRFQTLLALHRSYLTPGDSSSGWTA
GAAAYYVGYLQPRTFLLKYNENGTITDAVDCALDPLSETKCTLKSFTVEKGIYQTSNFRVQPTES
IVRFPNITNLCPFGEVFNATRFASVYAWNRKRISNCVADYSVLYNSASFSTFKCYGVSPTKLNDL
CFTNVYADSFVIRGDEVRQIAPGQTGKIADYNYKLPDDFTGCVIAWNSNNLDSKVGGNYNYLYRL
FRKSNLKPFERDISTEIYQAGSTPCNGVEGFNCYFPLQSYGFQPTNGVGYQPYRVVVLSFELLHA
PATVCGPKKSTNLVKNKCVNFNFNGLTGTGVLTESNKKFLPFQQFGRDIADITDAVRDPQTLEIL
DITPCSFGGVSVITPGTNTSNQVAVLYQDVNCTEVPVAIHADQLTPTWRVYSTGSNVFQTRAGCL
IGAEHVNNSYECDIPIGAGICASYQTQTNSPSRAGSVASQSIIAYTMSLGAENSVAYSNNSIAIP
TNFTISVTTEILPVSMTKTSVDCTMYICGDSTECSNLLLQYGSFCTQLNRALTGIAVEQDKNTQE
VFAQVKQIYKTPPIKDFGGFNFSQILPDPSKPSKRSFIEDLLFNKVTLADAGFIKQYGDCLGDIA
ARDLICAQKFNGLTVLPPLLTDEMIAQYTSALLACTITSGWTCGAGPALQIPFAMQMAYRFNGIG
VTQNVLYENQKLIANQFNSAIGKIQDSLSSTASALGKLQDVVNQNAQALNTLVKQLSSNFGAISS
VLNDILSRLDPPEAEVQIDRLITGRLQSLQTYVTQQLIRAAEIRASANLAATKMSECVLGQSKRV
DFCGKGYHLMSFPQSAPHGVVFLHVTYVPAQEKNFTTAPAICHDGKAHFPREGVFVSNGTHWFVT
QRNFYEPQIITTDNTFVSGNCDVVIGIVNNTVYDPLQPELDSFKEELDKYFKNHTSPDVDLGDIS
GINASVVNIQKEIDRLNEVAKNLNESLIDLQELGKYEQGSGYIPEAPRDGQAYVRKDGEWVLLST
FLGRSLEVLFQGPGSLPETGGGSDYKDDDDKGGGGSGGGGSGGGGSGGGGSGGGGSHHHHHH
SEQ ID NO 147: SEQ ID NO 3 + A892P + T572I +
S884C + A893C
MFVFLVLLPLVSSQCVNLTTRTQLPPAYTNSFTRGVYYPDKVFRSSVLHSTQDLFLPFFSNVTWF
HAIHVSGTNGTKRFDNPVLPFNDGVYFASTEKSNIIRGWIFGTTLDSKTQSLLIVNNATNVVIKV
CEFQFCNDPFLGVYYHKNNKSWMESEFRVYSSANNCTFEYVSQPFLMDLEGKQGNFKNLREFVFK
NIDGYFKIYSKHTPINLVRDLPQGFSALEPLVDLPIGINITRFQTLLALHRSYLTPGDSSSGWTA
GAAAYYVGYLQPRTFLLKYNENGTITDAVDCALDPLSETKCTLKSFTVEKGIYQTSNFRVQPTES
IVRFPNITNLCPFGEVFNATRFASVYAWNRKRISNCVADYSVLYNSASFSTFKCYGVSPTKLNDL
CFTNVYADSFVIRGDEVRQIAPGQTGKIADYNYKLPDDFTGCVIAWNSNNLDSKVGGNYNYLYRL
FRKSNLKPFERDISTEIYQAGSTPCNGVEGFNCYFPLQSYGFQPTNGVGYQPYRVVVLSFELLHA
PATVCGPKKSTNLVKNKCVNFNFNGLTGTGVLTESNKKFLPFQQFGRDIADITDAVRDPQTLEIL
DITPCSFGGVSVITPGTNTSNQVAVLYQDVNCTEVPVAIHADQLTPTWRVYSTGSNVFQTRAGCL
IGAEHVNNSYECDIPIGAGICASYQTQTNSPSRAGSVASQSIIAYTMSLGAENSVAYSNNSIAIP
TNFTISVTTEILPVSMTKTSVDCTMYICGDSTECSNLLLQYGSFCTQLNRALTGIAVEQDKNTQE
VFAQVKQIYKTPPIKDFGGFNFSQILPDPSKPSKRSFIEDLLFNKVTLADAGFIKQYGDCLGDIA
ARDLICAQKFNGLTVLPPLLTDEMIAQYTSALLAGTITCGWTFGAGPCLQIPFAMQMAYRFNGIG
VTQNVLYENQKLIANQFNSAIGKIQDSLSSTASALGKLQDVVNQNAQALNTLVKQLSSNFGAISS
VLNDILSRLDPPEAEVQIDRLITGRLQSLQTYVTQQLIRAAEIRASANLAATKMSECVLGQSKRV
DFCGKGYHLMSFPQSAPHGVVFLHVTYVPAQEKNFTTAPAICHDGKAHFPREGVFVSNGTHWFVT
QRNFYEPQIITTDNTFVSGNCDVVIGIVNNTVYDPLQPELDSFKEELDKYFKNHTSPDVDLGDIS
GINASVVNIQKEIDRLNEVAKNLNESLIDLQELGKYEQGSGYIPEAPRDGQAYVRKDGEWVLLST
FLGRSLEVLFQGPGSLPETGGGSDYKDDDDKGGGGSGGGGSGGGGSGGGGSGGGGSHHHHHH
SEQ ID NO 148: SEQ ID NO 3 + A892P + N532P + G880C + F888C
MFVFLVLLPLVSSQCVNLTTRTQLPPAYTNSFTRGVYYPDKVFRSSVLHSTQDLFLPFFSNVTWF
HAIHVSGTNGTKRFDNPVLPFNDGVYFASTEKSNIIRGWIFGTTLDSKTQSLLIVNNATNVVIKV
CEFQFCNDPFLGVYYHKNNKSWMESEFRVYSSANNCTFEYVSQPFLMDLEGKQGNFKNLREFVFK
NIDGYFKIYSKHTPINLVRDLPQGFSALEPLVDLPIGINITRFQTLLALHRSYLTPGDSSSGWTA
GAAAYYVGYLQPRTFLLKYNENGTITDAVDCALDPLSETKCTLKSFTVEKGIYQTSNFRVQPTES
IVRFPNITNLCPFGEVFNATRFASVYAWNRKRISNCVADYSVLYNSASFSTFKCYGVSPTKLNDL
CFTNVYADSFVIRGDEVRQIAPGQTGKIADYNYKLPDDFTGCVIAWNSNNLDSKVGGNYNYLYRL
FRKSNLKPFERDISTEIYQAGSTPCNGVEGFNCYFPLQSYGFQPTNGVGYQPYRVVVLSFELLHA
PATVCGPKKSTPLVKNKCVNFNFNGLTGTGVLTESNKKFLPFQQFGRDIADTTDAVRDPQTLEIL
DITPCSFGGVSVITPGTNTSNQVAVLYQDVNCTEVPVAIHADQLTPTWRVYSTGSNVFQTRAGCL
IGAEHVNNSYECDIPIGAGICASYQTQTNSPSRAGSVASQSIIAYTMSLGAENSVAYSNNSIAIP
TNFTISVTTEILPVSMTKTSVDCTMYICGDSTECSNLLLQYGSFCTQLNRALTGIAVEQDKNTQE
VFAQVKQIYKTPPIKDFGGFNFSQILPDPSKPSKRSFIEDLLFNKVTLADAGFIKQYGDCLGDIA
ARDLICAQKFNGLTVLPPLLTDEMIAQYTSALLACTITSGWTCGAGPALQIPFAMQMAYRFNGIG
VTQNVLYENQKLIANQFNSAIGKIQDSLSSTASALGKLQDVVNQNAQALNTLVKQLSSNFGAISS
VLNDILSRLDPPEAEVQIDRLITGRLQSLQTYVTQQLIRAAEIRASANLAATKMSECVLGQSKRV
DFCGKGYHLMSFPQSAPHGVVFLHVTYVPAQEKNFTTAPAICHDGKAHFPREGVFVSNGTHWFVT
QRNFYEPQIITTDNTFVSGNCDVVIGIVNNTVYDPLQPELDSFKEELDKYFKNHTSPDVDLGDIS
GINASVVNIQKEIDRLNEVAKNLNESLIDLQELGKYEQGSGYIPEAPRDGQAYVRKDGEWVLLST
FLGRSLEVLFQGPGSLPETGGGSDYKDDDDKGGGGSGGGGSGGGGSGGGGSGGGGSHHHHHH
SEQ ID NO 149: SEQ ID NO 3 + A892P + N532P + S884C + A893C
MFVFLVLLPLVSSQCVNLTTRTQLPPAYTNSFTRGVYYPDKVFRSSVLHSTQDLFLPFFSNVTWF
HAIHVSGTNGTKRFDNPVLPFNDGVYFASTEKSNIIRGWIFGTTLDSKTQSLLIVNNATNVVIKV
CEFQFCNDPFLGVYYHKNNKSWMESEFRVYSSANNCTFEYVSQPFLMDLEGKQGNFKNLREFVFK
NIDGYFKIYSKHTPINLVRDLPQGFSALEPLVDLPIGINITRFQTLLALHRSYLTPGDSSSGWTA
GAAAYYVGYLQPRTFLLKYNENGTITDAVDCALDPLSETKCTLKSFTVEKGIYQTSNFRVQPTES
IVRFPNITNLCPFGEVFNATRFASVYAWNRKRISNCVADYSVLYNSASFSTFKCYGVSPTKLNDL
CFTNVYADSFVIRGDEVRQIAPGQTGKIADYNYKLPDDFTGCVIAWNSNNLDSKVGGNYNYLYRL
FRKSNLKPFERDISTEIYQAGSTPCNGVEGFNCYFPLQSYGFQPTNGVGYQPYRVVVLSFELLHA
PATVCGPKKSTPLVKNKCVNFNFNGLTGTGVLTESNKKFLPFQQFGRDIADTTDAVRDPQTLEIL
DITPCSFGGVSVITPGTNTSNQVAVLYQDVNCTEVPVAIHADQLTPTWRVYSTGSNVFQTRAGCL
IGAEHVNNSYECDIPIGAGICASYQTQTNSPSRAGSVASQSIIAYTMSLGAENSVAYSNNSIAIP
TNFTISVTTEILPVSMTKTSVDCTMYICGDSTECSNLLLQYGSFCTQLNRALTGIAVEQDKNTQE
VFAQVKQIYKTPPIKDFGGFNFSQILPDPSKPSKRSFIEDLLFNKVTLADAGFIKQYGDCLGDIA
ARDLICAQKFNGLTVLPPLLTDEMIAQYTSALLAGTITCGWTFGAGPCLQIPFAMQMAYRFNGIG
VTQNVLYENQKLIANQFNSAIGKIQDSLSSTASALGKLQDVVNQNAQALNTLVKQLSSNFGAISS
VLNDILSRLDPPEAEVQIDRLITGRLQSLQTYVTQQLIRAAEIRASANLAATKMSECVLGQSKRV
DFCGKGYHLMSFPQSAPHGVVFLHVTYVPAQEKNFTTAPAICHDGKAHFPREGVFVSNGTHWFVT
QRNFYEPQIITTDNTFVSGNCDVVIGIVNNTVYDPLQPELDSFKEELDKYFKNHTSPDVDLGDIS
GINASVVNIQKEIDRLNEVAKNLNESLIDLQELGKYEQGSGYIPEAPRDGQAYVRKDGEWVLLST
FLGRSLEVLFQGPGSLPETGGGSDYKDDDDKGGGGSGGGGSGGGGSGGGGSGGGGSHHHHHH
SEQ ID NO 150: SEQ ID NO 3 + D614N + T572I +
N532P
MFVFLVLLPLVSSQCVNLTTRTQLPPAYTNSFTRGVYYPDKVFRSSVLHSTQDLFLPFFSNVTWF
HAIHVSGTNGTKRFDNPVLPFNDGVYFASTEKSNIIRGWIFGTTLDSKTQSLLIVNNATNVVIKV
CEFQFCNDPFLGVYYHKNNKSWMESEFRVYSSANNCTFEYVSQPFLMDLEGKQGNFKNLREFVFK
NIDGYFKIYSKHTPINLVRDLPQGFSALEPLVDLPIGINITRFQTLLALHRSYLTPGDSSSGWTA
GAAAYYVGYLQPRTFLLKYNENGTITDAVDCALDPLSETKCTLKSFTVEKGIYQTSNFRVQPTES
IVRFPNITNLCPFGEVFNATRFASVYAWNRKRISNCVADYSVLYNSASFSTFKCYGVSPTKLNDL
CFTNVYADSFVIRGDEVRQIAPGQTGKIADYNYKLPDDFTGCVIAWNSNNLDSKVGGNYNYLYRL
FRKSNLKPFERDISTEIYQAGSTPCNGVEGFNCYFPLQSYGFQPTNGVGYQPYRVVVLSFELLHA
PATVCGPKKSTPLVKNKCVNFNFNGLTGTGVLTESNKKFLPFQQFGRDIADITDAVRDPQTLEIL
DITPCSFGGVSVITPGTNTSNQVAVLYQNVNCTEVPVAIHADQLTPTWRVYSTGSNVFQTRAGCL
IGAEHVNNSYECDIPIGAGICASYQTQTNSPSRAGSVASQSIIAYTMSLGAENSVAYSNNSIAIP
TNFTISVTTEILPVSMTKTSVDCTMYICGDSTECSNLLLQYGSFCTQLNRALTGIAVEQDKNTQE
VFAQVKQIYKTPPIKDFGGFNFSQILPDPSKPSKRSFIEDLLFNKVTLADAGFIKQYGDCLGDIA
ARDLICAQKFNGLTVLPPLLTDEMIAQYTSALLAGTITSGWTFGAGAALQIPFAMQMAYRFNGIG
VTQNVLYENQKLIANQFNSAIGKIQDSLSSTASALGKLQDVVNQNAQALNTLVKQLSSNFGAISS
VLNDILSRLDPPEAEVQIDRLITGRLQSLQTYVTQQLIRAAEIRASANLAATKMSECVLGQSKRV
DFCGKGYHLMSFPQSAPHGVVFLHVTYVPAQEKNFTTAPAICHDGKAHFPREGVFVSNGTHWFVT
QRNFYEPQIITTDNTFVSGNCDVVIGIVNNTVYDPLQPELDSFKEELDKYFKNHTSPDVDLGDIS
GINASVVNIQKEIDRLNEVAKNLNESLIDLQELGKYEQGSGYIPEAPRDGQAYVRKDGEWVLLST
FLGRSLEVLFQGPGSLPETGGGSDYKDDDDKGGGGGGGGSGGGGSGGGGSGGGGSHHHHHH
SEQ ID NO 151: SEQ ID NO 3 + D614N + T572I +
G880C + F888C
MFVFLVLLPLVSSQCVNLTTRTQLPPAYTNSFTRGVYYPDKVFRSSVLHSTQDLFLPFFSNVTWF
HAIHVSGTNGTKRFDNPVLPFNDGVYFASTEKSNIIRGWIFGTTLDSKTQSLLIVNNATNVVIKV
CEFQFCNDPFLGVYYHKNNKSWMESEFRVYSSANNCTFEYVSQPFLMDLEGKQGNFKNLREFVFK
NIDGYFKIYSKHTPINLVRDLPQGFSALEPLVDLPIGINITRFQTLLALHRSYLTPGDSSSGWTA
GAAAYYVGYLQPRTFLLKYNENGTITDAVDCALDPLSETKCTLKSFTVEKGIYQTSNFRVQPTES
IVRFPNITNLCPFGEVFNATRFASVYAWNRKRISNCVADYSVLYNSASFSTFKCYGVSPTKLNDL
CFTNVYADSFVIRGDEVRQIAPGQTGKIADYNYKLPDDFTGCVIAWNSNNLDSKVGGNYNYLYRL
FRKSNLKPFERDISTEIYQAGSTPCNGVEGFNCYFPLQSYGFQPTNGVGYQPYRVVVLSFELLHA
PATVCGPKKSTNLVKNKCVNFNFNGLTGTGVLTESNKKFLPFQQFGRDIADITDAVRDPQTLEIL
DITPCSFGGVSVITPGTNTSNQVAVLYQNVNCTEVPVAIHADQLTPTWRVYSTGSNVFQTRAGCL
IGAEHVNNSYECDIPIGAGICASYQTQTNSPSRAGSVASQSIIAYTMSLGAENSVAYSNNSIAIP
TNFTISVTTEILPVSMTKTSVDCTMYICGDSTECSNLLLQYGSFCTQLNRALTGIAVEQDKNTQE
VFAQVKQIYKTPPIKDFGGFNFSQILPDPSKPSKRSFIEDLLFNKVTLADAGFIKQYGDCLGDIA
ARDLICAQKFNGLTVLPPLLTDEMIAQYTSALLACTITSGWTCGAGAALQIPFAMQMAYRFNGIG
VTQNVLYENQKLIANQFNSAIGKIQDSLSSTASALGKLQDVVNQNAQALNTLVKQLSSNFGAISS
VLNDILSRLDPPEAEVQIDRLITGRLQSLQTYVTQQLIRAAEIRASANLAATKMSECVLGQSKRV
DFCGKGYHLMSFPQSAPHGVVFLHVTYVPAQEKNFTTAPAICHDGKAHFPREGVFVSNGTHWFVT
QRNFYEPQIITTDNTFVSGNCDVVIGIVNNTVYDPLQPELDSFKEELDKYFKNHTSPDVDLGDIS
GINASVVNIQKEIDRLNEVAKNLNESLIDLQELGKYEQGSGYIPEAPRDGQAYVRKDGEWVLLST
FLGRSLEVLFQGPGSLPETGGGSDYKDDDDKGGGGSGGGGSGGGGSGGGGSGGGGSHHHHHH
SEQ ID NO 152: SEQ ID NO 3 + D614N + T572I +
S884C + A893C
MFVFLVLLPLVSSQCVNLTTRTQLPPAYTNSFTRGVYYPDKVFRSSVLHSTQDLFLPFFSNVTWF
HAIHVSGTNGTKRFDNPVLPFNDGVYFASTEKSNIIRGWIFGTTLDSKTQSLLIVNNATNVVIKV
CEFQFCNDPFLGVYYHKNNKSWMESEFRVYSSANNCTFEYVSQPFLMDLEGKQGNFKNLREFVFK
NIDGYFKIYSKHTPINLVRDLPQGFSALEPLVDLPIGINITRFQTLLALHRSYLTPGDSSSGWTA
GAAAYYVGYLQPRTFLLKYNENGTITDAVDCALDPLSETKCTLKSFTVEKGIYQTSNFRVQPTES
IVRFPNITNLCPFGEVFNATRFASVYAWNRKRISNCVADYSVLYNSASFSTFKCYGVSPTKLNDL
CFTNVYADSFVIRGDEVRQIAPGQTGKIADYNYKLPDDFTGCVIAWNSNNLDSKVGGNYNYLYRL
FRKSNLKPFERDISTEIYQAGSTPCNGVEGFNCYFPLQSYGFQPTNGVGYQPYRVVVLSFELLHA
PATVCGPKKSTNLVKNKCVNFNFNGLTGTGVLTESNKKFLPFQQFGRDIADITDAVRDPQTLEIL
DITPCSFGGVSVITPGTNTSNQVAVLYQNVNCTEVPVAIHADQLTPTWRVYSTGSNVFQTRAGCL
IGAEHVNNSYECDIPIGAGICASYQTQTNSPSRAGSVASQSIIAYTMSLGAENSVAYSNNSIAIP
TNFTISVTTEILPVSMTKTSVDCTMYICGDSTECSNLLLQYGSFCTQLNRALTGIAVEQDKNTQE
VFAQVKQIYKTPPIKDFGGFNFSQILPDPSKPSKRSFIEDLLFNKVTLADAGFIKQYGDCLGDIA
ARDLICAQKFNGLTVLPPLLTDEMIAQYTSALLAGTITCGWTFGAGACLQIPFAMQMAYRFNGIG
VTQNVLYENQKLIANQFNSAIGKIQDSLSSTASALGKLQDVVNQNAQALNTLVKQLSSNFGAISS
VLNDILSRLDPPEAEVQIDRLITGRLQSLQTYVTQQLIRAAEIRASANLAATKMSECVLGQSKRV
DFCGKGYHLMSFPQSAPHGVVFLHVTYVPAQEKNFTTAPAICHDGKAHFPREGVFVSNGTHWFVT
QRNFYEPQIITTDNTFVSGNCDVVIGIVNNTVYDPLQPELDSFKEELDKYFKNHTSPDVDLGDIS
GINASVVNIQKEIDRLNEVAKNLNESLIDLQELGKYEQGSGYIPEAPRDGQAYVRKDGEWVLLST
FLGRSLEVLFQGPGSLPETGGGSDYKDDDDKGGGGGGGGSGGGGSGGGGGGGGSHHHHHH
SEQ ID NO 153: SEQ ID NO 3 + D614N + N532P + G880C + F888C
MFVFLVLLPLVSSQCVNLTTRTQLPPAYTNSFTRGVYYPDKVFRSSVLHSTQDLFLPFFSNVTWF
HAIHVSGTNGTKRFDNPVLPFNDGVYFASTEKSNIIRGWIFGTTLDSKTQSLLIVNNATNVVIKV
CEFQFCNDPFLGVYYHKNNKSWMESEFRVYSSANNCTFEYVSQPFLMDLEGKQGNFKNLREFVFK
NIDGYFKIYSKHTPINLVRDLPQGFSALEPLVDLPIGINITRFQTLLALHRSYLTPGDSSSGWTA
GAAAYYVGYLQPRTFLLKYNENGTITDAVDCALDPLSETKCTLKSFTVEKGIYQTSNFRVQPTES
IVRFPNITNLCPFGEVFNATRFASVYAWNRKRISNCVADYSVLYNSASFSTFKCYGVSPTKLNDL
CFTNVYADSFVIRGDEVRQIAPGQTGKIADYNYKLPDDFTGCVIAWNSNNLDSKVGGNYNYLYRL
FRKSNLKPFERDISTEIYQAGSTPCNGVEGFNCYFPLQSYGFQPTNGVGYQPYRVVVLSFELLHA
PATVCGPKKSTPLVKNKCVNFNFNGLTGTGVLTESNKKFLPFQQFGRDIADTTDAVRDPQTLEIL
DITPCSFGGVSVITPGTNTSNQVAVLYQNVNCTEVPVAIHADQLTPTWRVYSTGSNVFQTRAGCL
IGAEHVNNSYECDIPIGAGICASYQTQTNSPSRAGSVASQSIIAYTMSLGAENSVAYSNNSIAIP
TNFTISVTTEILPVSMTKTSVDCTMYICGDSTECSNLLLQYGSFCTQLNRALTGIAVEQDKNTQE
VFAQVKQIYKTPPIKDFGGFNFSQILPDPSKPSKRSFIEDLLFNKVTLADAGFIKQYGDCLGDIA
ARDLICAQKFNGLTVLPPLLTDEMIAQYTSALLACTITSGWTCGAGAALQIPFAMQMAYRFNGIG
VTQNVLYENQKLIANQFNSAIGKIQDSLSSTASALGKLQDVVNQNAQALNTLVKQLSSNFGAISS
VLNDILSRLDPPEAEVQIDRLITGRLQSLQTYVTQQLIRAAEIRASANLAATKMSECVLGQSKRV
DFCGKGYHLMSFPQSAPHGVVFLHVTYVPAQEKNFTTAPAICHDGKAHFPREGVFVSNGTHWFVT
QRNFYEPQIITTDNTFVSGNCDVVIGIVNNTVYDPLQPELDSFKEELDKYFKNHTSPDVDLGDIS
GINASVVNIQKEIDRLNEVAKNLNESLIDLQELGKYEQGSGYIPEAPRDGQAYVRKDGEWVLLST
FLGRSLEVLFQGPGSLPETGGGSDYKDDDDKGGGGSGGGGSGGGGSGGGGGGGGSHHHHHH
SEQ ID NO 154: SEQ ID NO 3 + D614N + N532P + S884C + A893C
MFVFLVLLPLVSSQCVNLTTRTQLPPAYTNSFTRGVYYPDKVFRSSVLHSTQDLFLPFFSNVTWF
HAIHVSGTNGTKRFDNPVLPFNDGVYFASTEKSNIIRGWIFGTTLDSKTQSLLIVNNATNVVIKV
CEFQFCNDPFLGVYYHKNNKSWMESEFRVYSSANNCTFEYVSQPFLMDLEGKQGNFKNLREFVFK
NIDGYFKIYSKHTPINLVRDLPQGFSALEPLVDLPIGINITRFQTLLALHRSYLTPGDSSSGWTA
GAAAYYVGYLQPRTFLLKYNENGTITDAVDCALDPLSETKCTLKSFTVEKGIYQTSNFRVQPTES
IVRFPNITNLCPFGEVFNATRFASVYAWNRKRISNCVADYSVLYNSASFSTFKCYGVSPTKLNDL
CFTNVYADSFVIRGDEVRQIAPGQTGKIADYNYKLPDDFTGCVIAWNSNNLDSKVGGNYNYLYRL
FRKSNLKPFERDISTEIYQAGSTPCNGVEGFNCYFPLQSYGFQPTNGVGYQPYRVVVLSFELLHA
PATVCGPKKSTPLVKNKCVNFNFNGLTGTGVLTESNKKFLPFQQFGRDIADTTDAVRDPQTLEIL
DITPCSFGGVSVITPGTNTSNQVAVLYQNVNCTEVPVAIHADQLTPTWRVYSTGSNVFQTRAGCL
IGAEHVNNSYECDIPIGAGICASYQTQTNSPSRAGSVASQSIIAYTMSLGAENSVAYSNNSIAIP
TNFTISVTTEILPVSMTKTSVDCTMYICGDSTECSNLLLQYGSFCTQLNRALTGIAVEQDKNTQE
VFAQVKQIYKTPPIKDFGGFNFSQILPDPSKPSKRSFIEDLLFNKVTLADAGFIKQYGDCLGDIA
ARDLICAQKFNGLTVLPPLLTDEMIAQYTSALLAGTITCGWTFGAGACLQIPFAMQMAYRFNGIG
VTQNVLYENQKLIANQFNSAIGKIQDSLSSTASALGKLQDVVNQNAQALNTLVKQLSSNFGAISS
VLNDILSRLDPPEAEVQIDRLITGRLQSLQTYVTQQLIRAAEIRASANLAATKMSECVLGQSKRV
DFCGKGYHLMSFPQSAPHGVVFLHVTYVPAQEKNFTTAPAICHDGKAHFPREGVFVSNGTHWFVT
QRNFYEPQIITTDNTFVSGNCDVVIGIVNNTVYDPLQPELDSFKEELDKYFKNHTSPDVDLGDIS
GINASVVNIQKEIDRLNEVAKNLNESLIDLQELGKYEQGSGYIPEAPRDGQAYVRKDGEWVLLST
FLGRSLEVLFQGPGSLPETGGGSDYKDDDDKGGGGSGGGGSGGGGSGGGGSGGGGSHHHHHH
SEQ ID NO 155: SEQ ID NO 3 + T572I +
N532P + G880C + F888C
MFVFLVLLPLVSSQCVNLTTRTQLPPAYTNSFTRGVYYPDKVFRSSVLHSTQDLFLPFFSNVTWF
HAIHVSGTNGTKRFDNPVLPFNDGVYFASTEKSNIIRGWIFGTTLDSKTQSLLIVNNATNVVIKV
CEFQFCNDPFLGVYYHKNNKSWMESEFRVYSSANNCTFEYVSQPFLMDLEGKQGNFKNLREFVFK
NIDGYFKIYSKHTPINLVRDLPQGFSALEPLVDLPIGINITRFQTLLALHRSYLTPGDSSSGWTA
GAAAYYVGYLQPRTFLLKYNENGTITDAVDCALDPLSETKCTLKSFTVEKGIYQTSNFRVQPTES
IVRFPNITNLCPFGEVFNATRFASVYAWNRKRISNCVADYSVLYNSASFSTFKCYGVSPTKLNDL
CFTNVYADSFVIRGDEVRQIAPGQTGKIADYNYKLPDDFTGCVIAWNSNNLDSKVGGNYNYLYRL
FRKSNLKPFERDISTEIYQAGSTPCNGVEGFNCYFPLQSYGFQPTNGVGYQPYRVVVLSFELLHA
PATVCGPKKSTPLVKNKCVNFNFNGLTGTGVLTESNKKFLPFQQFGRDIADITDAVRDPQTLEIL
DITPCSFGGVSVITPGTNTSNQVAVLYQDVNCTEVPVAIHADQLTPTWRVYSTGSNVFQTRAGCL
IGAEHVNNSYECDIPIGAGICASYQTQTNSPSRAGSVASQSIIAYTMSLGAENSVAYSNNSIAIP
TNFTISVTTEILPVSMTKTSVDCTMYICGDSTECSNLLLQYGSFCTQLNRALTGIAVEQDKNTQE
VFAQVKQIYKTPPIKDFGGFNFSQILPDPSKPSKRSFIEDLLFNKVTLADAGFIKQYGDCLGDIA
ARDLICAQKFNGLTVLPPLLTDEMIAQYTSALLACTITSGWTCGAGAALQIPFAMQMAYRFNGIG
VTQNVLYENQKLIANQFNSAIGKIQDSLSSTASALGKLQDVVNQNAQALNTLVKQLSSNFGAISS
VLNDILSRLDPPEAEVQIDRLITGRLQSLQTYVTQQLIRAAEIRASANLAATKMSECVLGQSKRV
DFCGKGYHLMSFPQSAPHGVVFLHVTYVPAQEKNFTTAPAICHDGKAHFPREGVFVSNGTHWFVT
QRNFYEPQIITTDNTFVSGNCDVVIGIVNNTVYDPLQPELDSFKEELDKYFKNHTSPDVDLGDIS
GINASVVNIQKEIDRLNEVAKNLNESLIDLQELGKYEQGSGYIPEAPRDGQAYVRKDGEWVLLST
FLGRSLEVLFQGPGSLPETGGGSDYKDDDDKGGGGSGGGGGGGGSGGGGSGGGGSHHHHHH
SEQ ID NO 156: SEQ ID NO 3 + T572I +
N532P + S884C + A893C
MFVFLVLLPLVSSQCVNLTTRTQLPPAYTNSFTRGVYYPDKVFRSSVLHSTQDLFLPFFSNVTWF
HAIHVSGTNGTKRFDNPVLPFNDGVYFASTEKSNIIRGWIFGTTLDSKTQSLLIVNNATNVVIKV
CEFQFCNDPFLGVYYHKNNKSWMESEFRVYSSANNCTFEYVSQPFLMDLEGKQGNFKNLREFVFK
NIDGYFKIYSKHTPINLVRDLPQGFSALEPLVDLPIGINITRFQTLLALHRSYLTPGDSSSGWTA
GAAAYYVGYLQPRTFLLKYNENGTITDAVDCALDPLSETKCTLKSFTVEKGIYQTSNFRVQPTES
IVRFPNITNLCPFGEVFNATRFASVYAWNRKRISNCVADYSVLYNSASFSTFKCYGVSPTKLNDL
CFTNVYADSFVIRGDEVRQIAPGQTGKIADYNYKLPDDFTGCVIAWNSNNLDSKVGGNYNYLYRL
FRKSNLKPFERDISTEIYQAGSTPCNGVEGFNCYFPLQSYGFQPTNGVGYQPYRVVVLSFELLHA
PATVCGPKKSTPLVKNKCVNFNFNGLTGTGVLTESNKKFLPFQQFGRDIADITDAVRDPQTLEIL
DITPCSFGGVSVITPGTNTSNQVAVLYQDVNCTEVPVAIHADQLTPTWRVYSTGSNVFQTRAGCL
IGAEHVNNSYECDIPIGAGICASYQTQTNSPSRAGSVASQSIIAYTMSLGAENSVAYSNNSIAIP
TNFTISVTTEILPVSMTKTSVDCTMYICGDSTECSNLLLQYGSFCTQLNRALTGIAVEQDKNTQE
VFAQVKQIYKTPPIKDFGGFNFSQILPDPSKPSKRSFIEDLLFNKVTLADAGFIKQYGDCLGDIA
ARDLICAQKFNGLTVLPPLLTDEMIAQYTSALLAGTITCGWTFGAGACLQIPFAMQMAYRFNGIG
VTQNVLYENQKLIANQFNSAIGKIQDSLSSTASALGKLQDVVNQNAQALNTLVKQLSSNFGAISS
VLNDILSRLDPPEAEVQIDRLITGRLQSLQTYVTQQLIRAAEIRASANLAATKMSECVLGQSKRV
DFCGKGYHLMSFPQSAPHGVVFLHVTYVPAQEKNFTTAPAICHDGKAHFPREGVFVSNGTHWFVT
QRNFYEPQIITTDNTFVSGNCDVVIGIVNNTVYDPLQPELDSFKEELDKYFKNHTSPDVDLGDIS
GINASVVNIQKEIDRLNEVAKNLNESLIDLQELGKYEQGSGYIPEAPRDGQAYVRKDGEWVLLST
FLGRSLEVLFQGPGSLPETGGGSDYKDDDDKGGGGSGGGGSGGGGSGGGGSGGGGSHHHHHH
SEQ ID NO 157: SEQ ID NO 3 + A942P + A892P + D614N + T572I
MFVFLVLLPLVSSQCVNLTTRTQLPPAYTNSFTRGVYYPDKVFRSSVLHSTQDLFLPFFSNVTWF
HAIHVSGTNGTKRFDNPVLPFNDGVYFASTEKSNIIRGWIFGTTLDSKTQSLLIVNNATNVVIKV
CEFQFCNDPFLGVYYHKNNKSWMESEFRVYSSANNCTFEYVSQPFLMDLEGKQGNFKNLREFVFK
NIDGYFKIYSKHTPINLVRDLPQGFSALEPLVDLPIGINITRFQTLLALHRSYLTPGDSSSGWTA
GAAAYYVGYLQPRTFLLKYNENGTITDAVDCALDPLSETKCTLKSFTVEKGIYQTSNFRVQPTES
IVRFPNITNLCPFGEVFNATRFASVYAWNRKRISNCVADYSVLYNSASFSTFKCYGVSPTKLNDL
CFTNVYADSFVIRGDEVRQIAPGQTGKIADYNYKLPDDFTGCVIAWNSNNLDSKVGGNYNYLYRL
FRKSNLKPFERDISTEIYQAGSTPCNGVEGFNCYFPLQSYGFQPTNGVGYQPYRVVVLSFELLHA
PATVCGPKKSTNLVKNKCVNFNFNGLTGTGVLTESNKKFLPFQQFGRDIADITDAVRDPQTLEIL
DITPCSFGGVSVITPGTNTSNQVAVLYQNVNCTEVPVAIHADQLTPTWRVYSTGSNVFQTRAGCL
IGAEHVNNSYECDIPIGAGICASYQTQTNSPSRAGSVASQSIIAYTMSLGAENSVAYSNNSIAIP
TNFTISVTTEILPVSMTKTSVDCTMYICGDSTECSNLLLQYGSFCTQLNRALTGIAVEQDKNTQE
VFAQVKQIYKTPPIKDFGGFNFSQILPDPSKPSKRSFIEDLLFNKVTLADAGFIKQYGDCLGDIA
ARDLICAQKFNGLTVLPPLLTDEMIAQYTSALLAGTITSGWTFGAGPALQIPFAMQMAYRFNGIG
VTQNVLYENQKLIANQFNSAIGKIQDSLSSTPSALGKLQDVVNQNAQALNTLVKQLSSNFGAISS
VLNDILSRLDPPEAEVQIDRLITGRLQSLQTYVTQQLIRAAEIRASANLAATKMSECVLGQSKRV
DFCGKGYHLMSFPQSAPHGVVFLHVTYVPAQEKNFTTAPAICHDGKAHFPREGVFVSNGTHWFVT
QRNFYEPQIITTDNTFVSGNCDVVIGIVNNTVYDPLQPELDSFKEELDKYFKNHTSPDVDLGDIS
GINASVVNIQKEIDRLNEVAKNLNESLIDLQELGKYEQGSGYIPEAPRDGQAYVRKDGEWVLLST
FLGRSLEVLFQGPGSLPETGGGSDYKDDDDKGGGGSGGGGSGGGGSGGGGSGGGGSHHHHHH
SEQ ID NO 158: SEQ ID NO 3 + A942P + A892P + D614N + N532P
MFVFLVLLPLVSSQCVNLTTRTQLPPAYTNSFTRGVYYPDKVFRSSVLHSTQDLFLPFFSNVTWF
HAIHVSGTNGTKRFDNPVLPFNDGVYFASTEKSNIIRGWIFGTTLDSKTQSLLIVNNATNVVIKV
CEFQFCNDPFLGVYYHKNNKSWMESEFRVYSSANNCTFEYVSQPFLMDLEGKQGNFKNLREFVFK
NIDGYFKIYSKHTPINLVRDLPQGFSALEPLVDLPIGINITRFQTLLALHRSYLTPGDSSSGWTA
GAAAYYVGYLQPRTFLLKYNENGTITDAVDCALDPLSETKCTLKSFTVEKGIYQTSNFRVQPTES
IVRFPNITNLCPFGEVFNATRFASVYAWNRKRISNCVADYSVLYNSASFSTFKCYGVSPTKLNDL
CFTNVYADSFVIRGDEVRQIAPGQTGKIADYNYKLPDDFTGCVIAWNSNNLDSKVGGNYNYLYRL
FRKSNLKPFERDISTEIYQAGSTPCNGVEGFNCYFPLQSYGFQPTNGVGYQPYRVVVLSFELLHA
PATVCGPKKSTPLVKNKCVNFNFNGLTGTGVLTESNKKFLPFQQFGRDIADTTDAVRDPQTLEIL
DITPCSFGGVSVITPGTNTSNQVAVLYQNVNCTEVPVAIHADQLTPTWRVYSTGSNVFQTRAGCL
IGAEHVNNSYECDIPIGAGICASYQTQTNSPSRAGSVASQSIIAYTMSLGAENSVAYSNNSIAIP
TNFTISVTTEILPVSMTKTSVDCTMYICGDSTECSNLLLQYGSFCTQLNRALTGIAVEQDKNTQE
VFAQVKQIYKTPPIKDFGGFNFSQILPDPSKPSKRSFIEDLLFNKVTLADAGFIKQYGDCLGDIA
ARDLICAQKFNGLTVLPPLLTDEMIAQYTSALLAGTITSGWTFGAGPALQIPFAMQMAYRFNGIG
VTQNVLYENQKLIANQFNSAIGKIQDSLSSTPSALGKLQDVVNQNAQALNTLVKQLSSNFGAISS
VLNDILSRLDPPEAEVQIDRLITGRLQSLQTYVTQQLIRAAEIRASANLAATKMSECVLGQSKRV
DFCGKGYHLMSFPQSAPHGVVFLHVTYVPAQEKNFTTAPAICHDGKAHFPREGVFVSNGTHWFVT
QRNFYEPQIITTDNTFVSGNCDVVIGIVNNTVYDPLQPELDSFKEELDKYFKNHTSPDVDLGDIS
GINASVVNIQKEIDRLNEVAKNLNESLIDLQELGKYEQGSGYIPEAPRDGQAYVRKDGEWVLLST
FLGRSLEVLFQGPGSLPETGGGSDYKDDDDKGGGGSGGGGSGGGGSGGGGSGGGGSHHHHHH
SEQ ID NO 159: SEQ ID NO 3 + A942P + A892P + D614N + G880C + F888C
MFVFLVLLPLVSSQCVNLTTRTQLPPAYTNSFTRGVYYPDKVFRSSVLHSTQDLFLPFFSNVTWF
HAIHVSGTNGTKRFDNPVLPFNDGVYFASTEKSNIIRGWIFGTTLDSKTQSLLIVNNATNVVIKV
CEFQFCNDPFLGVYYHKNNKSWMESEFRVYSSANNCTFEYVSQPFLMDLEGKQGNFKNLREFVFK
NIDGYFKIYSKHTPINLVRDLPQGFSALEPLVDLPIGINITRFQTLLALHRSYLTPGDSSSGWTA
GAAAYYVGYLQPRTFLLKYNENGTITDAVDCALDPLSETKCTLKSFTVEKGIYQTSNFRVQPTES
IVRFPNITNLCPFGEVFNATRFASVYAWNRKRISNCVADYSVLYNSASFSTFKCYGVSPTKLNDL
CFTNVYADSFVIRGDEVRQIAPGQTGKIADYNYKLPDDFTGCVIAWNSNNLDSKVGGNYNYLYRL
FRKSNLKPFERDISTEIYQAGSTPCNGVEGFNCYFPLQSYGFQPTNGVGYQPYRVVVLSFELLHA
PATVCGPKKSTNLVKNKCVNFNFNGLTGTGVLTESNKKFLPFQQFGRDIADTTDAVRDPQTLEIL
DITPCSFGGVSVITPGTNTSNQVAVLYQNVNCTEVPVAIHADQLTPTWRVYSTGSNVFQTRAGCL
IGAEHVNNSYECDIPIGAGICASYQTQTNSPSRAGSVASQSIIAYTMSLGAENSVAYSNNSIAIP
TNFTISVTTEILPVSMTKTSVDCTMYICGDSTECSNLLLQYGSFCTQLNRALTGIAVEQDKNTQE
VFAQVKQIYKTPPIKDFGGFNFSQILPDPSKPSKRSFIEDLLFNKVTLADAGFIKQYGDCLGDIA
ARDLICAQKFNGLTVLPPLLTDEMIAQYTSALLACTITSGWTCGAGPALQIPFAMQMAYRFNGIG
VTQNVLYENQKLIANQFNSAIGKIQDSLSSTPSALGKLQDVVNQNAQALNTLVKQLSSNFGAISS
VLNDILSRLDPPEAEVQIDRLITGRLQSLQTYVTQQLIRAAEIRASANLAATKMSECVLGQSKRV
DFCGKGYHLMSFPQSAPHGVVFLHVTYVPAQEKNFTTAPAICHDGKAHFPREGVFVSNGTHWFVT
QRNFYEPQIITTDNTFVSGNCDVVIGIVNNTVYDPLQPELDSFKEELDKYFKNHTSPDVDLGDIS
GINASVVNIQKEIDRLNEVAKNLNESLIDLQELGKYEQGSGYIPEAPRDGQAYVRKDGEWVLLST
FLGRSLEVLFQGPGSLPETGGGSDYKDDDDKGGGGSGGGGSGGGGSGGGGSGGGGSHHHHHH
SEQ ID NO 160: SEQ ID NO 3 + A942P + A892P + D614N + S884C + A893C
MFVFLVLLPLVSSQCVNLTTRTQLPPAYTNSFTRGVYYPDKVFRSSVLHSTQDLFLPFFSNVTWF
HAIHVSGTNGTKRFDNPVLPFNDGVYFASTEKSNIIRGWIFGTTLDSKTQSLLIVNNATNVVIKV
CEFQFCNDPFLGVYYHKNNKSWMESEFRVYSSANNCTFEYVSQPFLMDLEGKQGNFKNLREFVFK
NIDGYFKIYSKHTPINLVRDLPQGFSALEPLVDLPIGINITRFQTLLALHRSYLTPGDSSSGWTA
GAAAYYVGYLQPRTFLLKYNENGTITDAVDCALDPLSETKCTLKSFTVEKGIYQTSNFRVQPTES
IVRFPNITNLCPFGEVFNATRFASVYAWNRKRISNCVADYSVLYNSASFSTFKCYGVSPTKLNDL
CFTNVYADSFVIRGDEVRQIAPGQTGKIADYNYKLPDDFTGCVIAWNSNNLDSKVGGNYNYLYRL
FRKSNLKPFERDISTEIYQAGSTPCNGVEGFNCYFPLQSYGFQPTNGVGYQPYRVVVLSFELLHA
PATVCGPKKSTNLVKNKCVNFNFNGLTGTGVLTESNKKFLPFQQFGRDIADTTDAVRDPQTLEIL
DITPCSFGGVSVITPGTNTSNQVAVLYQNVNCTEVPVAIHADQLTPTWRVYSTGSNVFQTRAGCL
IGAEHVNNSYECDIPIGAGICASYQTQTNSPSRAGSVASQSIIAYTMSLGAENSVAYSNNSIAIP
TNFTISVTTEILPVSMTKTSVDCTMYICGDSTECSNLLLQYGSFCTQLNRALTGIAVEQDKNTQE
VFAQVKQIYKTPPIKDFGGFNFSQILPDPSKPSKRSFIEDLLFNKVTLADAGFIKQYGDCLGDIA
ARDLICAQKFNGLTVLPPLLTDEMIAQYTSALLAGTITCGWTFGAGPCLQIPFAMQMAYRFNGIG
VTQNVLYENQKLIANQFNSAIGKIQDSLSSTPSALGKLQDVVNQNAQALNTLVKQLSSNFGAISS
VLNDILSRLDPPEAEVQIDRLITGRLQSLQTYVTQQLIRAAEIRASANLAATKMSECVLGQSKRV
DFCGKGYHLMSFPQSAPHGVVFLHVTYVPAQEKNFTTAPAICHDGKAHFPREGVFVSNGTHWFVT
QRNFYEPQIITTDNTFVSGNCDVVIGIVNNTVYDPLQPELDSFKEELDKYFKNHTSPDVDLGDIS
GINASVVNIQKEIDRLNEVAKNLNESLIDLQELGKYEQGSGYIPEAPRDGQAYVRKDGEWVLLST
FLGRSLEVLFQGPGSLPETGGGSDYKDDDDKGGGGSGGGGSGGGGSGGGGSGGGGSHHHHHH
SEQ ID NO 161: SEQ ID NO 3 + A942P + A892P + T572I +
N532P
MFVFLVLLPLVSSQCVNLTTRTQLPPAYTNSFTRGVYYPDKVFRSSVLHSTQDLFLPFFSNVTWF
HAIHVSGTNGTKRFDNPVLPFNDGVYFASTEKSNIIRGWIFGTTLDSKTQSLLIVNNATNVVIKV
CEFQFCNDPFLGVYYHKNNKSWMESEFRVYSSANNCTFEYVSQPFLMDLEGKQGNFKNLREFVFK
NIDGYFKIYSKHTPINLVRDLPQGFSALEPLVDLPIGINITRFQTLLALHRSYLTPGDSSSGWTA
GAAAYYVGYLQPRTFLLKYNENGTITDAVDCALDPLSETKCTLKSFTVEKGIYQTSNFRVQPTES
IVRFPNITNLCPFGEVFNATRFASVYAWNRKRISNCVADYSVLYNSASFSTFKCYGVSPTKLNDL
CFTNVYADSFVIRGDEVRQIAPGQTGKIADYNYKLPDDFTGCVIAWNSNNLDSKVGGNYNYLYRL
FRKSNLKPFERDISTEIYQAGSTPCNGVEGFNCYFPLQSYGFQPTNGVGYQPYRVVVLSFELLHA
PATVCGPKKSTPLVKNKCVNFNFNGLTGTGVLTESNKKFLPFQQFGRDIADITDAVRDPQTLEIL
DITPCSFGGVSVITPGTNTSNQVAVLYQDVNCTEVPVAIHADQLTPTWRVYSTGSNVFQTRAGCL
IGAEHVNNSYECDIPIGAGICASYQTQTNSPSRAGSVASQSIIAYTMSLGAENSVAYSNNSIAIP
TNFTISVTTEILPVSMTKTSVDCTMYICGDSTECSNLLLQYGSFCTQLNRALTGIAVEQDKNTQE
VFAQVKQIYKTPPIKDFGGFNFSQILPDPSKPSKRSFIEDLLFNKVTLADAGFIKQYGDCLGDIA
ARDLICAQKFNGLTVLPPLLTDEMIAQYTSALLAGTITSGWTFGAGPALQIPFAMQMAYRFNGIG
VTQNVLYENQKLIANQFNSAIGKIQDSLSSTPSALGKLQDVVNQNAQALNTLVKQLSSNFGAISS
VLNDILSRLDPPEAEVQIDRLITGRLQSLQTYVTQQLIRAAEIRASANLAATKMSECVLGQSKRV
DFCGKGYHLMSFPQSAPHGVVFLHVTYVPAQEKNFTTAPAICHDGKAHFPREGVFVSNGTHWFVT
QRNFYEPQIITTDNTFVSGNCDVVIGIVNNTVYDPLQPELDSFKEELDKYFKNHTSPDVDLGDIS
GINASVVNIQKEIDRLNEVAKNLNESLIDLQELGKYEQGSGYIPEAPRDGQAYVRKDGEWVLLST
FLGRSLEVLFQGPGSLPETGGGSDYKDDDDKGGGGSGGGGSGGGGSGGGGSGGGGSHHHHHH
SEQ ID NO 162: SEQ ID NO 3 + A942P + A892P + T572I +
G880C + F888C
MFVFLVLLPLVSSQCVNLTTRTQLPPAYTNSFTRGVYYPDKVFRSSVLHSTQDLFLPFFSNVTWF
HAIHVSGTNGTKRFDNPVLPFNDGVYFASTEKSNIIRGWIFGTTLDSKTQSLLIVNNATNVVIKV
CEFQFCNDPFLGVYYHKNNKSWMESEFRVYSSANNCTFEYVSQPFLMDLEGKQGNFKNLREFVFK
NIDGYFKIYSKHTPINLVRDLPQGFSALEPLVDLPIGINITRFQTLLALHRSYLTPGDSSSGWTA
GAAAYYVGYLQPRTFLLKYNENGTITDAVDCALDPLSETKCTLKSFTVEKGIYQTSNFRVQPTES
IVRFPNITNLCPFGEVFNATRFASVYAWNRKRISNCVADYSVLYNSASFSTFKCYGVSPTKLNDL
CFTNVYADSFVIRGDEVRQIAPGQTGKIADYNYKLPDDFTGCVIAWNSNNLDSKVGGNYNYLYRL
FRKSNLKPFERDISTEIYQAGSTPCNGVEGFNCYFPLQSYGFQPTNGVGYQPYRVVVLSFELLHA
PATVCGPKKSTNLVKNKCVNFNFNGLTGTGVLTESNKKFLPFQQFGRDIADITDAVRDPQTLEIL
DITPCSFGGVSVITPGTNTSNQVAVLYQDVNCTEVPVAIHADQLTPTWRVYSTGSNVFQTRAGCL
IGAEHVNNSYECDIPIGAGICASYQTQTNSPSRAGSVASQSIIAYTMSLGAENSVAYSNNSIAIP
TNFTISVTTEILPVSMTKTSVDCTMYICGDSTECSNLLLQYGSFCTQLNRALTGIAVEQDKNTQE
VFAQVKQIYKTPPIKDFGGFNFSQILPDPSKPSKRSFIEDLLFNKVTLADAGFIKQYGDCLGDIA
ARDLICAQKFNGLTVLPPLLTDEMIAQYTSALLACTITSGWTCGAGPALQIPFAMQMAYRFNGIG
VTQNVLYENQKLIANQFNSAIGKIQDSLSSTPSALGKLQDVVNQNAQALNTLVKQLSSNFGAISS
VLNDILSRLDPPEAEVQIDRLITGRLQSLQTYVTQQLIRAAEIRASANLAATKMSECVLGQSKRV
DFCGKGYHLMSFPQSAPHGVVFLHVTYVPAQEKNFTTAPAICHDGKAHFPREGVFVSNGTHWFVT
QRNFYEPQIITTDNTFVSGNCDVVIGIVNNTVYDPLQPELDSFKEELDKYFKNHTSPDVDLGDIS
GINASVVNIQKEIDRLNEVAKNLNESLIDLQELGKYEQGSGYIPEAPRDGQAYVRKDGEWVLLST
FLGRSLEVLFQGPGSLPETGGGSDYKDDDDKGGGGSGGGGSGGGGGGGGSGGGGSHHHHHH
SEQ ID NO 163: SEQ ID NO 3 + A942P + A892P + T572I +
S884C + A893C
MFVFLVLLPLVSSQCVNLTTRTQLPPAYTNSFTRGVYYPDKVFRSSVLHSTQDLFLPFFSNVTWF
HAIHVSGTNGTKRFDNPVLPFNDGVYFASTEKSNIIRGWIFGTTLDSKTQSLLIVNNATNVVIKV
CEFQFCNDPFLGVYYHKNNKSWMESEFRVYSSANNCTFEYVSQPFLMDLEGKQGNFKNLREFVFK
NIDGYFKIYSKHTPINLVRDLPQGFSALEPLVDLPIGINITRFQTLLALHRSYLTPGDSSSGWTA
GAAAYYVGYLQPRTFLLKYNENGTITDAVDCALDPLSETKCTLKSFTVEKGIYQTSNFRVQPTES
IVRFPNITNLCPFGEVFNATRFASVYAWNRKRISNCVADYSVLYNSASFSTFKCYGVSPTKLNDL
CFTNVYADSFVIRGDEVRQIAPGQTGKIADYNYKLPDDFTGCVIAWNSNNLDSKVGGNYNYLYRL
FRKSNLKPFERDISTEIYQAGSTPCNGVEGFNCYFPLQSYGFQPTNGVGYQPYRVVVLSFELLHA
PATVCGPKKSTNLVKNKCVNFNFNGLTGTGVLTESNKKFLPFQQFGRDIADITDAVRDPQTLEIL
DITPCSFGGVSVITPGTNTSNQVAVLYQDVNCTEVPVAIHADQLTPTWRVYSTGSNVFQTRAGCL
IGAEHVNNSYECDIPIGAGICASYQTQTNSPSRAGSVASQSIIAYTMSLGAENSVAYSNNSIAIP
TNFTISVTTEILPVSMTKTSVDCTMYICGDSTECSNLLLQYGSFCTQLNRALTGIAVEQDKNTQE
VFAQVKQIYKTPPIKDFGGFNFSQILPDPSKPSKRSFIEDLLFNKVTLADAGFIKQYGDCLGDIA
ARDLICAQKFNGLTVLPPLLTDEMIAQYTSALLAGTITCGWTFGAGPCLQIPFAMQMAYRFNGIG
VTQNVLYENQKLIANQFNSAIGKIQDSLSSTPSALGKLQDVVNQNAQALNTLVKQLSSNFGAISS
VLNDILSRLDPPEAEVQIDRLITGRLQSLQTYVTQQLIRAAEIRASANLAATKMSECVLGQSKRV
DFCGKGYHLMSFPQSAPHGVVFLHVTYVPAQEKNFTTAPAICHDGKAHFPREGVFVSNGTHWFVT
QRNFYEPQIITTDNTFVSGNCDVVIGIVNNTVYDPLQPELDSFKEELDKYFKNHTSPDVDLGDIS
GINASVVNIQKEIDRLNEVAKNLNESLIDLQELGKYEQGSGYIPEAPRDGQAYVRKDGEWVLLST
FLGRSLEVLFQGPGSLPETGGGSDYKDDDDKGGGGSGGGGSGGGGSGGGGSGGGGSHHHHHH
SEQ ID NO 164: SEQ ID NO 3 + A942P + A892P + N532P + G880C + F888C
MFVFLVLLPLVSSQCVNLTTRTQLPPAYTNSFTRGVYYPDKVFRSSVLHSTQDLFLPFFSNVTWF
HAIHVSGTNGTKRFDNPVLPFNDGVYFASTEKSNIIRGWIFGTTLDSKTQSLLIVNNATNVVIKV
CEFQFCNDPFLGVYYHKNNKSWMESEFRVYSSANNCTFEYVSQPFLMDLEGKQGNFKNLREFVFK
NIDGYFKIYSKHTPINLVRDLPQGFSALEPLVDLPIGINITRFQTLLALHRSYLTPGDSSSGWTA
GAAAYYVGYLQPRTFLLKYNENGTITDAVDCALDPLSETKCTLKSFTVEKGIYQTSNFRVQPTES
IVRFPNITNLCPFGEVFNATRFASVYAWNRKRISNCVADYSVLYNSASFSTFKCYGVSPTKLNDL
CFTNVYADSFVIRGDEVRQIAPGQTGKIADYNYKLPDDFTGCVIAWNSNNLDSKVGGNYNYLYRL
FRKSNLKPFERDISTEIYQAGSTPCNGVEGFNCYFPLQSYGFQPTNGVGYQPYRVVVLSFELLHA
PATVCGPKKSTPLVKNKCVNFNFNGLTGTGVLTESNKKFLPFQQFGRDIADTTDAVRDPQTLEIL
DITPCSFGGVSVITPGTNTSNQVAVLYQDVNCTEVPVAIHADQLTPTWRVYSTGSNVFQTRAGCL
IGAEHVNNSYECDIPIGAGICASYQTQTNSPSRAGSVASQSIIAYTMSLGAENSVAYSNNSIAIP
TNFTISVTTEILPVSMTKTSVDCTMYICGDSTECSNLLLQYGSFCTQLNRALTGIAVEQDKNTQE
VFAQVKQIYKTPPIKDFGGFNFSQILPDPSKPSKRSFIEDLLFNKVTLADAGFIKQYGDCLGDIA
ARDLICAQKFNGLTVLPPLLTDEMIAQYTSALLACTITSGWTCGAGPALQIPFAMQMAYRFNGIG
VTQNVLYENQKLIANQFNSAIGKIQDSLSSTPSALGKLQDVVNQNAQALNTLVKQLSSNFGAISS
VLNDILSRLDPPEAEVQIDRLITGRLQSLQTYVTQQLIRAAEIRASANLAATKMSECVLGQSKRV
DFCGKGYHLMSFPQSAPHGVVFLHVTYVPAQEKNFTTAPAICHDGKAHFPREGVFVSNGTHWFVT
QRNFYEPQIITTDNTFVSGNCDVVIGIVNNTVYDPLQPELDSFKEELDKYFKNHTSPDVDLGDIS
GINASVVNIQKEIDRLNEVAKNLNESLIDLQELGKYEQGSGYIPEAPRDGQAYVRKDGEWVLLST
FLGRSLEVLFQGPGSLPETGGGSDYKDDDDKGGGGSGGGGSGGGGSGGGGSGGGGSHHHHHH
SEQ ID NO 165: SEQ ID NO 3 + A942P + A892P + N532P + S884C + A893C
MFVFLVLLPLVSSQCVNLTTRTQLPPAYTNSFTRGVYYPDKVFRSSVLHSTQDLFLPFFSNVTWF
HAIHVSGTNGTKRFDNPVLPFNDGVYFASTEKSNIIRGWIFGTTLDSKTQSLLIVNNATNVVIKV
CEFQFCNDPFLGVYYHKNNKSWMESEFRVYSSANNCTFEYVSQPFLMDLEGKQGNFKNLREFVFK
NIDGYFKIYSKHTPINLVRDLPQGFSALEPLVDLPIGINITRFQTLLALHRSYLTPGDSSSGWTA
GAAAYYVGYLQPRTFLLKYNENGTITDAVDCALDPLSETKCTLKSFTVEKGIYQTSNFRVQPTES
IVRFPNITNLCPFGEVFNATRFASVYAWNRKRISNCVADYSVLYNSASFSTFKCYGVSPTKLNDL
CFTNVYADSFVIRGDEVRQIAPGQTGKIADYNYKLPDDFTGCVIAWNSNNLDSKVGGNYNYLYRL
FRKSNLKPFERDISTEIYQAGSTPCNGVEGFNCYFPLQSYGFQPTNGVGYQPYRVVVLSFELLHA
PATVCGPKKSTPLVKNKCVNFNFNGLTGTGVLTESNKKFLPFQQFGRDIADTTDAVRDPQTLEIL
DITPCSFGGVSVITPGTNTSNQVAVLYQDVNCTEVPVAIHADQLTPTWRVYSTGSNVFQTRAGCL
IGAEHVNNSYECDIPIGAGICASYQTQTNSPSRAGSVASQSIIAYTMSLGAENSVAYSNNSIAIP
TNFTISVTTEILPVSMTKTSVDCTMYICGDSTECSNLLLQYGSFCTQLNRALTGIAVEQDKNTQE
VFAQVKQIYKTPPIKDFGGFNFSQILPDPSKPSKRSFIEDLLFNKVTLADAGFIKQYGDCLGDIA
ARDLICAQKFNGLTVLPPLLTDEMIAQYTSALLAGTITCGWTFGAGPCLQIPFAMQMAYRFNGIG
VTQNVLYENQKLIANQFNSAIGKIQDSLSSTPSALGKLQDVVNQNAQALNTLVKQLSSNFGAISS
VLNDILSRLDPPEAEVQIDRLITGRLQSLQTYVTQQLIRAAEIRASANLAATKMSECVLGQSKRV
DFCGKGYHLMSFPQSAPHGVVFLHVTYVPAQEKNFTTAPAICHDGKAHFPREGVFVSNGTHWFVT
QRNFYEPQIITTDNTFVSGNCDVVIGIVNNTVYDPLQPELDSFKEELDKYFKNHTSPDVDLGDIS
GINASVVNIQKEIDRLNEVAKNLNESLIDLQELGKYEQGSGYIPEAPRDGQAYVRKDGEWVLLST
FLGRSLEVLFQGPGSLPETGGGSDYKDDDDKGGGGSGGGGSGGGGSGGGGSGGGGSHHHHHH
SEQ ID NO 166: SEQ ID NO 3 + A942P + D614N + T572I +
N532P
MFVFLVLLPLVSSQCVNLTTRTQLPPAYTNSFTRGVYYPDKVFRSSVLHSTQDLFLPFFSNVTWF
HAIHVSGTNGTKRFDNPVLPFNDGVYFASTEKSNIIRGWIFGTTLDSKTQSLLIVNNATNVVIKV
CEFQFCNDPFLGVYYHKNNKSWMESEFRVYSSANNCTFEYVSQPFLMDLEGKQGNFKNLREFVFK
NIDGYFKIYSKHTPINLVRDLPQGFSALEPLVDLPIGINITRFQTLLALHRSYLTPGDSSSGWTA
GAAAYYVGYLQPRTFLLKYNENGTITDAVDCALDPLSETKCTLKSFTVEKGIYQTSNFRVQPTES
IVRFPNITNLCPFGEVFNATRFASVYAWNRKRISNCVADYSVLYNSASFSTFKCYGVSPTKLNDL
CFTNVYADSFVIRGDEVRQIAPGQTGKIADYNYKLPDDFTGCVIAWNSNNLDSKVGGNYNYLYRL
FRKSNLKPFERDISTEIYQAGSTPCNGVEGFNCYFPLQSYGFQPTNGVGYQPYRVVVLSFELLHA
PATVCGPKKSTPLVKNKCVNFNFNGLTGTGVLTESNKKFLPFQQFGRDIADITDAVRDPQTLEIL
DITPCSFGGVSVITPGTNTSNQVAVLYQNVNCTEVPVAIHADQLTPTWRVYSTGSNVFQTRAGCL
IGAEHVNNSYECDIPIGAGICASYQTQTNSPSRAGSVASQSIIAYTMSLGAENSVAYSNNSIAIP
TNFTISVTTEILPVSMTKTSVDCTMYICGDSTECSNLLLQYGSFCTQLNRALTGIAVEQDKNTQE
VFAQVKQIYKTPPIKDFGGFNFSQILPDPSKPSKRSFIEDLLFNKVTLADAGFIKQYGDCLGDIA
ARDLICAQKFNGLTVLPPLLTDEMIAQYTSALLAGTITSGWTFGAGAALQIPFAMQMAYRFNGIG
VTQNVLYENQKLIANQFNSAIGKIQDSLSSTPSALGKLQDVVNQNAQALNTLVKQLSSNFGAISS
VLNDILSRLDPPEAEVQIDRLITGRLQSLQTYVTQQLIRAAEIRASANLAATKMSECVLGQSKRV
DFCGKGYHLMSFPQSAPHGVVFLHVTYVPAQEKNFTTAPAICHDGKAHFPREGVFVSNGTHWFVT
QRNFYEPQIITTDNTFVSGNCDVVIGIVNNTVYDPLQPELDSFKEELDKYFKNHTSPDVDLGDIS
GINASVVNIQKEIDRLNEVAKNLNESLIDLQELGKYEQGSGYIPEAPRDGQAYVRKDGEWVLLST
FLGRSLEVLFQGPGSLPETGGGSDYKDDDDKGGGGSGGGGSGGGGSGGGGSGGGGSHHHHHH
SEQ ID NO 167: SEQ ID NO 3 + A942P + D614N + T572I +
G880C + F888C
MFVFLVLLPLVSSQCVNLTTRTQLPPAYTNSFTRGVYYPDKVFRSSVLHSTQDLFLPFFSNVTWF
HAIHVSGTNGTKRFDNPVLPFNDGVYFASTEKSNIIRGWIFGTTLDSKTQSLLIVNNATNVVIKV
CEFQFCNDPFLGVYYHKNNKSWMESEFRVYSSANNCTFEYVSQPFLMDLEGKQGNFKNLREFVFK
NIDGYFKIYSKHTPINLVRDLPQGFSALEPLVDLPIGINITRFQTLLALHRSYLTPGDSSSGWTA
GAAAYYVGYLQPRTFLLKYNENGTITDAVDCALDPLSETKCTLKSFTVEKGIYQTSNFRVQPTES
IVRFPNITNLCPFGEVFNATRFASVYAWNRKRISNCVADYSVLYNSASFSTFKCYGVSPTKLNDL
CFTNVYADSFVIRGDEVRQIAPGQTGKIADYNYKLPDDFTGCVIAWNSNNLDSKVGGNYNYLYRL
FRKSNLKPFERDISTEIYQAGSTPCNGVEGFNCYFPLQSYGFQPTNGVGYQPYRVVVLSFELLHA
PATVCGPKKSTNLVKNKCVNFNFNGLTGTGVLTESNKKFLPFQQFGRDIADITDAVRDPQTLEIL
DITPCSFGGVSVITPGTNTSNQVAVLYQNVNCTEVPVAIHADQLTPTWRVYSTGSNVFQTRAGCL
IGAEHVNNSYECDIPIGAGICASYQTQTNSPSRAGSVASQSIIAYTMSLGAENSVAYSNNSIAIP
TNFTISVTTEILPVSMTKTSVDCTMYICGDSTECSNLLLQYGSFCTQLNRALTGIAVEQDKNTQE
VFAQVKQIYKTPPIKDFGGFNFSQILPDPSKPSKRSFIEDLLFNKVTLADAGFIKQYGDCLGDIA
ARDLICAQKFNGLTVLPPLLTDEMIAQYTSALLACTITSGWTCGAGAALQIPFAMQMAYRFNGIG
VTQNVLYENQKLIANQFNSAIGKIQDSLSSTPSALGKLQDVVNQNAQALNTLVKQLSSNFGAISS
VLNDILSRLDPPEAEVQIDRLITGRLQSLQTYVTQQLIRAAEIRASANLAATKMSECVLGQSKRV
DFCGKGYHLMSFPQSAPHGVVFLHVTYVPAQEKNFTTAPAICHDGKAHFPREGVFVSNGTHWFVT
QRNFYEPQIITTDNTFVSGNCDVVIGIVNNTVYDPLQPELDSFKEELDKYFKNHTSPDVDLGDIS
GINASVVNIQKEIDRLNEVAKNLNESLIDLQELGKYEQGSGYIPEAPRDGQAYVRKDGEWVLLST
FLGRSLEVLFQGPGSLPETGGGSDYKDDDDKGGGGSGGGGSGGGGSGGGGSGGGGSHHHHHH
SEQ ID NO 168: SEQ ID NO 3 + A942P + D614N + T572I +
S884C + A893C
MFVFLVLLPLVSSQCVNLTTRTQLPPAYTNSFTRGVYYPDKVFRSSVLHSTQDLFLPFFSNVTWF
HAIHVSGTNGTKRFDNPVLPFNDGVYFASTEKSNIIRGWIFGTTLDSKTQSLLIVNNATNVVIKV
CEFQFCNDPFLGVYYHKNNKSWMESEFRVYSSANNCTFEYVSQPFLMDLEGKQGNFKNLREFVFK
NIDGYFKIYSKHTPINLVRDLPQGFSALEPLVDLPIGINITRFQTLLALHRSYLTPGDSSSGWTA
GAAAYYVGYLQPRTFLLKYNENGTITDAVDCALDPLSETKCTLKSFTVEKGIYQTSNFRVQPTES
IVRFPNITNLCPFGEVFNATRFASVYAWNRKRISNCVADYSVLYNSASFSTFKCYGVSPTKLNDL
CFTNVYADSFVIRGDEVRQIAPGQTGKIADYNYKLPDDFTGCVIAWNSNNLDSKVGGNYNYLYRL
FRKSNLKPFERDISTEIYQAGSTPCNGVEGFNCYFPLQSYGFQPTNGVGYQPYRVVVLSFELLHA
PATVCGPKKSTNLVKNKCVNFNFNGLTGTGVLTESNKKFLPFQQFGRDIADITDAVRDPQTLEIL
DITPCSFGGVSVITPGTNTSNQVAVLYQNVNCTEVPVAIHADQLTPTWRVYSTGSNVFQTRAGCL
IGAEHVNNSYECDIPIGAGICASYQTQTNSPSRAGSVASQSIIAYTMSLGAENSVAYSNNSIAIP
TNFTISVTTEILPVSMTKTSVDCTMYICGDSTECSNLLLQYGSFCTQLNRALTGIAVEQDKNTQE
VFAQVKQIYKTPPIKDFGGFNFSQILPDPSKPSKRSFIEDLLFNKVTLADAGFIKQYGDCLGDIA
ARDLICAQKFNGLTVLPPLLTDEMIAQYTSALLAGTITCGWTFGAGACLQIPFAMQMAYRFNGIG
VTQNVLYENQKLIANQFNSAIGKIQDSLSSTPSALGKLQDVVNQNAQALNTLVKQLSSNFGAISS
VLNDILSRLDPPEAEVQIDRLITGRLQSLQTYVTQQLIRAAEIRASANLAATKMSECVLGQSKRV
DFCGKGYHLMSFPQSAPHGVVFLHVTYVPAQEKNFTTAPAICHDGKAHFPREGVFVSNGTHWFVT
QRNFYEPQIITTDNTFVSGNCDVVIGIVNNTVYDPLQPELDSFKEELDKYFKNHTSPDVDLGDIS
GINASVVNIQKEIDRLNEVAKNLNESLIDLQELGKYEQGSGYIPEAPRDGQAYVRKDGEWVLLST
FLGRSLEVLFQGPGSLPETGGGSDYKDDDDKGGGGSGGGGSGGGGSGGGGSGGGGSHHHHHH
SEQ ID NO 169: SEQ ID NO 3 + A942P + D614N + N532P + G880C + F888C
MFVFLVLLPLVSSQCVNLTTRTQLPPAYTNSFTRGVYYPDKVFRSSVLHSTQDLFLPFFSNVTWF
HAIHVSGTNGTKRFDNPVLPFNDGVYFASTEKSNIIRGWIFGTTLDSKTQSLLIVNNATNVVIKV
CEFQFCNDPFLGVYYHKNNKSWMESEFRVYSSANNCTFEYVSQPFLMDLEGKQGNFKNLREFVFK
NIDGYFKIYSKHTPINLVRDLPQGFSALEPLVDLPIGINITRFQTLLALHRSYLTPGDSSSGWTA
GAAAYYVGYLQPRTFLLKYNENGTITDAVDCALDPLSETKCTLKSFTVEKGIYQTSNFRVQPTES
IVRFPNITNLCPFGEVFNATRFASVYAWNRKRISNCVADYSVLYNSASFSTFKCYGVSPTKLNDL
CFTNVYADSFVIRGDEVRQIAPGQTGKIADYNYKLPDDFTGCVIAWNSNNLDSKVGGNYNYLYRL
FRKSNLKPFERDISTEIYQAGSTPCNGVEGFNCYFPLQSYGFQPTNGVGYQPYRVVVLSFELLHA
PATVCGPKKSTPLVKNKCVNFNFNGLTGTGVLTESNKKFLPFQQFGRDIADTTDAVRDPQTLEIL
DITPCSFGGVSVITPGTNTSNQVAVLYQNVNCTEVPVAIHADQLTPTWRVYSTGSNVFQTRAGCL
IGAEHVNNSYECDIPIGAGICASYQTQTNSPSRAGSVASQSIIAYTMSLGAENSVAYSNNSIAIP
TNFTISVTTEILPVSMTKTSVDCTMYICGDSTECSNLLLQYGSFCTQLNRALTGIAVEQDKNTQE
VFAQVKQIYKTPPIKDFGGFNFSQILPDPSKPSKRSFIEDLLFNKVTLADAGFIKQYGDCLGDIA
ARDLICAQKFNGLTVLPPLLTDEMIAQYTSALLACTITSGWTCGAGAALQIPFAMQMAYRFNGIG
VTQNVLYENQKLIANQFNSAIGKIQDSLSSTPSALGKLQDVVNQNAQALNTLVKQLSSNFGAISS
VLNDILSRLDPPEAEVQIDRLITGRLQSLQTYVTQQLIRAAEIRASANLAATKMSECVLGQSKRV
DFCGKGYHLMSFPQSAPHGVVFLHVTYVPAQEKNFTTAPAICHDGKAHFPREGVFVSNGTHWFVT
QRNFYEPQIITTDNTFVSGNCDVVIGIVNNTVYDPLQPELDSFKEELDKYFKNHTSPDVDLGDIS
GINASVVNIQKEIDRLNEVAKNLNESLIDLQELGKYEQGSGYIPEAPRDGQAYVRKDGEWVLLST
FLGRSLEVLFQGPGSLPETGGGSDYKDDDDKGGGGSGGGGSGGGGSGGGGSGGGGSHHHHHH
SEQ ID NO 170: SEQ ID NO 3 + A942P + D614N + N532P + S884C + A893C
MFVFLVLLPLVSSQCVNLTTRTQLPPAYTNSFTRGVYYPDKVFRSSVLHSTQDLFLPFFSNVTWF
HAIHVSGTNGTKRFDNPVLPFNDGVYFASTEKSNIIRGWIFGTTLDSKTQSLLIVNNATNVVIKV
CEFQFCNDPFLGVYYHKNNKSWMESEFRVYSSANNCTFEYVSQPFLMDLEGKQGNFKNLREFVFK
NIDGYFKIYSKHTPINLVRDLPQGFSALEPLVDLPIGINITRFQTLLALHRSYLTPGDSSSGWTA
GAAAYYVGYLQPRTFLLKYNENGTITDAVDCALDPLSETKCTLKSFTVEKGIYQTSNFRVQPTES
IVRFPNITNLCPFGEVFNATRFASVYAWNRKRISNCVADYSVLYNSASFSTFKCYGVSPTKLNDL
CFTNVYADSFVIRGDEVRQIAPGQTGKIADYNYKLPDDFTGCVIAWNSNNLDSKVGGNYNYLYRL
FRKSNLKPFERDISTEIYQAGSTPCNGVEGFNCYFPLQSYGFQPTNGVGYQPYRVVVLSFELLHA
PATVCGPKKSTPLVKNKCVNFNFNGLTGTGVLTESNKKFLPFQQFGRDIADTTDAVRDPQTLEIL
DITPCSFGGVSVITPGTNTSNQVAVLYQNVNCTEVPVAIHADQLTPTWRVYSTGSNVFQTRAGCL
IGAEHVNNSYECDIPIGAGICASYQTQTNSPSRAGSVASQSIIAYTMSLGAENSVAYSNNSIAIP
TNFTISVTTEILPVSMTKTSVDCTMYICGDSTECSNLLLQYGSFCTQLNRALTGIAVEQDKNTQE
VFAQVKQIYKTPPIKDFGGFNFSQILPDPSKPSKRSFIEDLLFNKVTLADAGFIKQYGDCLGDIA
ARDLICAQKFNGLTVLPPLLTDEMIAQYTSALLAGTITCGWTFGAGACLQIPFAMQMAYRFNGIG
VTQNVLYENQKLIANQFNSAIGKIQDSLSSTPSALGKLQDVVNQNAQALNTLVKQLSSNFGAISS
VLNDILSRLDPPEAEVQIDRLITGRLQSLQTYVTQQLIRAAEIRASANLAATKMSECVLGQSKRV
DFCGKGYHLMSFPQSAPHGVVFLHVTYVPAQEKNFTTAPAICHDGKAHFPREGVFVSNGTHWFVT
QRNFYEPQIITTDNTFVSGNCDVVIGIVNNTVYDPLQPELDSFKEELDKYFKNHTSPDVDLGDIS
GINASVVNIQKEIDRLNEVAKNLNESLIDLQELGKYEQGSGYIPEAPRDGQAYVRKDGEWVLLST
FLGRSLEVLFQGPGSLPETGGGSDYKDDDDKGGGGSGGGGSGGGGSGGGGSGGGGSHHHHHH
SEQ ID NO 171: SEQ ID NO 3 + A942P + T572I +
N532P + G880C + F888C
MFVFLVLLPLVSSQCVNLTTRTQLPPAYTNSFTRGVYYPDKVFRSSVLHSTQDLFLPFFSNVTWF
HAIHVSGTNGTKRFDNPVLPFNDGVYFASTEKSNIIRGWIFGTTLDSKTQSLLIVNNATNVVIKV
CEFQFCNDPFLGVYYHKNNKSWMESEFRVYSSANNCTFEYVSQPFLMDLEGKQGNFKNLREFVFK
NIDGYFKIYSKHTPINLVRDLPQGFSALEPLVDLPIGINITRFQTLLALHRSYLTPGDSSSGWTA
GAAAYYVGYLQPRTFLLKYNENGTITDAVDCALDPLSETKCTLKSFTVEKGIYQTSNFRVQPTES
IVRFPNITNLCPFGEVFNATRFASVYAWNRKRISNCVADYSVLYNSASFSTFKCYGVSPTKLNDL
CFTNVYADSFVIRGDEVRQIAPGQTGKIADYNYKLPDDFTGCVIAWNSNNLDSKVGGNYNYLYRL
FRKSNLKPFERDISTEIYQAGSTPCNGVEGFNCYFPLQSYGFQPTNGVGYQPYRVVVLSFELLHA
PATVCGPKKSTPLVKNKCVNFNFNGLTGTGVLTESNKKFLPFQQFGRDIADITDAVRDPQTLEIL
DITPCSFGGVSVITPGTNTSNQVAVLYQDVNCTEVPVAIHADQLTPTWRVYSTGSNVFQTRAGCL
IGAEHVNNSYECDIPIGAGICASYQTQTNSPSRAGSVASQSIIAYTMSLGAENSVAYSNNSIAIP
TNFTISVTTEILPVSMTKTSVDCTMYICGDSTECSNLLLQYGSFCTQLNRALTGIAVEQDKNTQE
VFAQVKQIYKTPPIKDFGGFNFSQILPDPSKPSKRSFIEDLLFNKVTLADAGFIKQYGDCLGDIA
ARDLICAQKFNGLTVLPPLLTDEMIAQYTSALLACTITSGWTCGAGAALQIPFAMQMAYRFNGIG
VTQNVLYENQKLIANQFNSAIGKIQDSLSSTPSALGKLQDVVNQNAQALNTLVKQLSSNFGAISS
VLNDILSRLDPPEAEVQIDRLITGRLQSLQTYVTQQLIRAAEIRASANLAATKMSECVLGQSKRV
DFCGKGYHLMSFPQSAPHGVVFLHVTYVPAQEKNFTTAPAICHDGKAHFPREGVFVSNGTHWFVT
QRNFYEPQIITTDNTFVSGNCDVVIGIVNNTVYDPLQPELDSFKEELDKYFKNHTSPDVDLGDIS
GINASVVNIQKEIDRLNEVAKNLNESLIDLQELGKYEQGSGYIPEAPRDGQAYVRKDGEWVLLST
FLGRSLEVLFQGPGSLPETGGGSDYKDDDDKGGGGSGGGGSGGGGSGGGGSGGGGSHHHHHH
SEQ ID NO 172: SEQ ID NO 3 + A942P + T572I +
N532P + S884C + A893C
MFVFLVLLPLVSSQCVNLTTRTQLPPAYTNSFTRGVYYPDKVFRSSVLHSTQDLFLPFFSNVTWF
HAIHVSGTNGTKRFDNPVLPFNDGVYFASTEKSNIIRGWIFGTTLDSKTQSLLIVNNATNVVIKV
CEFQFCNDPFLGVYYHKNNKSWMESEFRVYSSANNCTFEYVSQPFLMDLEGKQGNFKNLREFVFK
NIDGYFKIYSKHTPINLVRDLPQGFSALEPLVDLPIGINITRFQTLLALHRSYLTPGDSSSGWTA
GAAAYYVGYLQPRTFLLKYNENGTITDAVDCALDPLSETKCTLKSFTVEKGIYQTSNFRVQPTES
IVRFPNITNLCPFGEVFNATRFASVYAWNRKRISNCVADYSVLYNSASFSTFKCYGVSPTKLNDL
CFTNVYADSFVIRGDEVRQIAPGQTGKIADYNYKLPDDFTGCVIAWNSNNLDSKVGGNYNYLYRL
FRKSNLKPFERDISTEIYQAGSTPCNGVEGFNCYFPLQSYGFQPTNGVGYQPYRVVVLSFELLHA
PATVCGPKKSTPLVKNKCVNFNFNGLTGTGVLTESNKKFLPFQQFGRDIADITDAVRDPQTLEIL
DITPCSFGGVSVITPGTNTSNQVAVLYQDVNCTEVPVAIHADQLTPTWRVYSTGSNVFQTRAGCL
IGAEHVNNSYECDIPIGAGICASYQTQTNSPSRAGSVASQSIIAYTMSLGAENSVAYSNNSIAIP
TNFTISVTTEILPVSMTKTSVDCTMYICGDSTECSNLLLQYGSFCTQLNRALTGIAVEQDKNTQE
VFAQVKQIYKTPPIKDFGGFNFSQILPDPSKPSKRSFIEDLLFNKVTLADAGFIKQYGDCLGDIA
ARDLICAQKFNGLTVLPPLLTDEMIAQYTSALLAGTITCGWTFGAGACLQIPFAMQMAYRFNGIG
VTQNVLYENQKLIANQFNSAIGKIQDSLSSTPSALGKLQDVVNQNAQALNTLVKQLSSNFGAISS
VLNDILSRLDPPEAEVQIDRLITGRLQSLQTYVTQQLIRAAEIRASANLAATKMSECVLGQSKRV
DFCGKGYHLMSFPQSAPHGVVFLHVTYVPAQEKNFTTAPAICHDGKAHFPREGVFVSNGTHWFVT
QRNFYEPQIITTDNTFVSGNCDVVIGIVNNTVYDPLQPELDSFKEELDKYFKNHTSPDVDLGDIS
GINASVVNIQKEIDRLNEVAKNLNESLIDLQELGKYEQGSGYIPEAPRDGQAYVRKDGEWVLLST
FLGRSLEVLFQGPGSLPETGGGSDYKDDDDKGGGGSGGGGGGGGSGGGGSGGGGSHHHHHH
SEQ ID NO 173: SEQ ID NO 3 + A892P + D614N + T572I +
N532P
MFVFLVLLPLVSSQCVNLTTRTQLPPAYTNSFTRGVYYPDKVFRSSVLHSTQDLFLPFFSNVTWF
HAIHVSGTNGTKRFDNPVLPFNDGVYFASTEKSNIIRGWIFGTTLDSKTQSLLIVNNATNVVIKV
CEFQFCNDPFLGVYYHKNNKSWMESEFRVYSSANNCTFEYVSQPFLMDLEGKQGNFKNLREFVFK
NIDGYFKIYSKHTPINLVRDLPQGFSALEPLVDLPIGINITRFQTLLALHRSYLTPGDSSSGWTA
GAAAYYVGYLQPRTFLLKYNENGTITDAVDCALDPLSETKCTLKSFTVEKGIYQTSNFRVQPTES
IVRFPNITNLCPFGEVFNATRFASVYAWNRKRISNCVADYSVLYNSASFSTFKCYGVSPTKLNDL
CFTNVYADSFVIRGDEVRQIAPGQTGKIADYNYKLPDDFTGCVIAWNSNNLDSKVGGNYNYLYRL
FRKSNLKPFERDISTEIYQAGSTPCNGVEGFNCYFPLQSYGFQPTNGVGYQPYRVVVLSFELLHA
PATVCGPKKSTPLVKNKCVNFNFNGLTGTGVLTESNKKFLPFQQFGRDIADITDAVRDPQTLEIL
DITPCSFGGVSVITPGTNTSNQVAVLYQNVNCTEVPVAIHADQLTPTWRVYSTGSNVFQTRAGCL
IGAEHVNNSYECDIPIGAGICASYQTQTNSPSRAGSVASQSIIAYTMSLGAENSVAYSNNSIAIP
TNFTISVTTEILPVSMTKTSVDCTMYICGDSTECSNLLLQYGSFCTQLNRALTGIAVEQDKNTQE
VFAQVKQIYKTPPIKDFGGFNFSQILPDPSKPSKRSFIEDLLFNKVTLADAGFIKQYGDCLGDIA
ARDLICAQKFNGLTVLPPLLTDEMIAQYTSALLAGTITSGWTFGAGPALQIPFAMQMAYRFNGIG
VTQNVLYENQKLIANQFNSAIGKIQDSLSSTASALGKLQDVVNQNAQALNTLVKQLSSNFGAISS
VLNDILSRLDPPEAEVQIDRLITGRLQSLQTYVTQQLIRAAEIRASANLAATKMSECVLGQSKRV
DFCGKGYHLMSFPQSAPHGVVFLHVTYVPAQEKNFTTAPAICHDGKAHFPREGVFVSNGTHWFVT
QRNFYEPQIITTDNTFVSGNCDVVIGIVNNTVYDPLQPELDSFKEELDKYFKNHTSPDVDLGDIS
GINASVVNIQKEIDRLNEVAKNLNESLIDLQELGKYEQGSGYIPEAPRDGQAYVRKDGEWVLLST
FLGRSLEVLFQGPGSLPETGGGSDYKDDDDKGGGGSGGGGSGGGGSGGGGSGGGGSHHHHHH
SEQ ID NO 174: SEQ ID NO 3 + A892P + D614N + T572I +
G880C + F888C
MFVFLVLLPLVSSQCVNLTTRTQLPPAYTNSFTRGVYYPDKVFRSSVLHSTQDLFLPFFSNVTWF
HAIHVSGTNGTKRFDNPVLPFNDGVYFASTEKSNIIRGWIFGTTLDSKTQSLLIVNNATNVVIKV
CEFQFCNDPFLGVYYHKNNKSWMESEFRVYSSANNCTFEYVSQPFLMDLEGKQGNFKNLREFVFK
NIDGYFKIYSKHTPINLVRDLPQGFSALEPLVDLPIGINITRFQTLLALHRSYLTPGDSSSGWTA
GAAAYYVGYLQPRTFLLKYNENGTITDAVDCALDPLSETKCTLKSFTVEKGIYQTSNFRVQPTES
IVRFPNITNLCPFGEVFNATRFASVYAWNRKRISNCVADYSVLYNSASFSTFKCYGVSPTKLNDL
CFTNVYADSFVIRGDEVRQIAPGQTGKIADYNYKLPDDFTGCVIAWNSNNLDSKVGGNYNYLYRL
FRKSNLKPFERDISTEIYQAGSTPCNGVEGFNCYFPLQSYGFQPTNGVGYQPYRVVVLSFELLHA
PATVCGPKKSTNLVKNKCVNFNFNGLTGTGVLTESNKKFLPFQQFGRDIADITDAVRDPQTLEIL
DITPCSFGGVSVITPGTNTSNQVAVLYQNVNCTEVPVAIHADQLTPTWRVYSTGSNVFQTRAGCL
IGAEHVNNSYECDIPIGAGICASYQTQTNSPSRAGSVASQSIIAYTMSLGAENSVAYSNNSIAIP
TNFTISVTTEILPVSMTKTSVDCTMYICGDSTECSNLLLQYGSFCTQLNRALTGIAVEQDKNTQE
VFAQVKQIYKTPPIKDFGGFNFSQILPDPSKPSKRSFIEDLLFNKVTLADAGFIKQYGDCLGDIA
ARDLICAQKFNGLTVLPPLLTDEMIAQYTSALLACTITSGWTCGAGPALQIPFAMQMAYRFNGIG
VTQNVLYENQKLIANQFNSAIGKIQDSLSSTASALGKLQDVVNQNAQALNTLVKQLSSNFGAISS
VLNDILSRLDPPEAEVQIDRLITGRLQSLQTYVTQQLIRAAEIRASANLAATKMSECVLGQSKRV
DFCGKGYHLMSFPQSAPHGVVFLHVTYVPAQEKNFTTAPAICHDGKAHFPREGVFVSNGTHWFVT
QRNFYEPQIITTDNTFVSGNCDVVIGIVNNTVYDPLQPELDSFKEELDKYFKNHTSPDVDLGDIS
GINASVVNIQKEIDRLNEVAKNLNESLIDLQELGKYEQGSGYIPEAPRDGQAYVRKDGEWVLLST
FLGRSLEVLFQGPGSLPETGGGSDYKDDDDKGGGGSGGGGSGGGGSGGGGSGGGGSHHHHHH
SEQ ID NO 175: SEQ ID NO 3 + A892P + D614N + T572I +
S884C + A893C
MFVFLVLLPLVSSQCVNLTTRTQLPPAYTNSFTRGVYYPDKVFRSSVLHSTQDLFLPFFSNVTWF
HAIHVSGTNGTKRFDNPVLPFNDGVYFASTEKSNIIRGWIFGTTLDSKTQSLLIVNNATNVVIKV
CEFQFCNDPFLGVYYHKNNKSWMESEFRVYSSANNCTFEYVSQPFLMDLEGKQGNFKNLREFVFK
NIDGYFKIYSKHTPINLVRDLPQGFSALEPLVDLPIGINITRFQTLLALHRSYLTPGDSSSGWTA
GAAAYYVGYLQPRTFLLKYNENGTITDAVDCALDPLSETKCTLKSFTVEKGIYQTSNFRVQPTES
IVRFPNITNLCPFGEVFNATRFASVYAWNRKRISNCVADYSVLYNSASFSTFKCYGVSPTKLNDL
CFTNVYADSFVIRGDEVRQIAPGQTGKIADYNYKLPDDFTGCVIAWNSNNLDSKVGGNYNYLYRL
FRKSNLKPFERDISTEIYQAGSTPCNGVEGFNCYFPLQSYGFQPTNGVGYQPYRVVVLSFELLHA
PATVCGPKKSTNLVKNKCVNFNFNGLTGTGVLTESNKKFLPFQQFGRDIADITDAVRDPQTLEIL
DITPCSFGGVSVITPGTNTSNQVAVLYQNVNCTEVPVAIHADQLTPTWRVYSTGSNVFQTRAGCL
IGAEHVNNSYECDIPIGAGICASYQTQTNSPSRAGSVASQSIIAYTMSLGAENSVAYSNNSIAIP
TNFTISVTTEILPVSMTKTSVDCTMYICGDSTECSNLLLQYGSFCTQLNRALTGIAVEQDKNTQE
VFAQVKQIYKTPPIKDFGGFNFSQILPDPSKPSKRSFIEDLLFNKVTLADAGFIKQYGDCLGDIA
ARDLICAQKFNGLTVLPPLLTDEMIAQYTSALLAGTITCGWTFGAGPCLQIPFAMQMAYRFNGIG
VTQNVLYENQKLIANQFNSAIGKIQDSLSSTASALGKLQDVVNQNAQALNTLVKQLSSNFGAISS
VLNDILSRLDPPEAEVQIDRLITGRLQSLQTYVTQQLIRAAEIRASANLAATKMSECVLGQSKRV
DFCGKGYHLMSFPQSAPHGVVFLHVTYVPAQEKNFTTAPAICHDGKAHFPREGVFVSNGTHWFVT
QRNFYEPQIITTDNTFVSGNCDVVIGIVNNTVYDPLQPELDSFKEELDKYFKNHTSPDVDLGDIS
GINASVVNIQKEIDRLNEVAKNLNESLIDLQELGKYEQGSGYIPEAPRDGQAYVRKDGEWVLLST
FLGRSLEVLFQGPGSLPETGGGSDYKDDDDKGGGGSGGGGGGGGSGGGGSGGGGSHHHHHH
SEQ ID NO 176: SEQ ID NO 3 + A892P + D614N + N532P + G880C + F888C
MFVFLVLLPLVSSQCVNLTTRTQLPPAYTNSFTRGVYYPDKVFRSSVLHSTQDLFLPFFSNVTWF
HAIHVSGTNGTKRFDNPVLPFNDGVYFASTEKSNIIRGWIFGTTLDSKTQSLLIVNNATNVVIKV
CEFQFCNDPFLGVYYHKNNKSWMESEFRVYSSANNCTFEYVSQPFLMDLEGKQGNFKNLREFVFK
NIDGYFKIYSKHTPINLVRDLPQGFSALEPLVDLPIGINITRFQTLLALHRSYLTPGDSSSGWTA
GAAAYYVGYLQPRTFLLKYNENGTITDAVDCALDPLSETKCTLKSFTVEKGIYQTSNFRVQPTES
IVRFPNITNLCPFGEVFNATRFASVYAWNRKRISNCVADYSVLYNSASFSTFKCYGVSPTKLNDL
CFTNVYADSFVIRGDEVRQIAPGQTGKIADYNYKLPDDFTGCVIAWNSNNLDSKVGGNYNYLYRL
FRKSNLKPFERDISTEIYQAGSTPCNGVEGFNCYFPLQSYGFQPTNGVGYQPYRVVVLSFELLHA
PATVCGPKKSTPLVKNKCVNFNFNGLTGTGVLTESNKKFLPFQQFGRDIADTTDAVRDPQTLEIL
DITPCSFGGVSVITPGTNTSNQVAVLYQNVNCTEVPVAIHADQLTPTWRVYSTGSNVFQTRAGCL
IGAEHVNNSYECDIPIGAGICASYQTQTNSPSRAGSVASQSIIAYTMSLGAENSVAYSNNSIAIP
TNFTISVTTEILPVSMTKTSVDCTMYICGDSTECSNLLLQYGSFCTQLNRALTGIAVEQDKNTQE
VFAQVKQIYKTPPIKDFGGFNFSQILPDPSKPSKRSFIEDLLFNKVTLADAGFIKQYGDCLGDIA
ARDLICAQKFNGLTVLPPLLTDEMIAQYTSALLACTITSGWTCGAGPALQIPFAMQMAYRFNGIG
VTQNVLYENQKLIANQFNSAIGKIQDSLSSTASALGKLQDVVNQNAQALNTLVKQLSSNFGAISS
VLNDILSRLDPPEAEVQIDRLITGRLQSLQTYVTQQLIRAAEIRASANLAATKMSECVLGQSKRV
DFCGKGYHLMSFPQSAPHGVVFLHVTYVPAQEKNFTTAPAICHDGKAHFPREGVFVSNGTHWFVT
QRNFYEPQIITTDNTFVSGNCDVVIGIVNNTVYDPLQPELDSFKEELDKYFKNHTSPDVDLGDIS
GINASVVNIQKEIDRLNEVAKNLNESLIDLQELGKYEQGSGYIPEAPRDGQAYVRKDGEWVLLST
FLGRSLEVLFQGPGSLPETGGGSDYKDDDDKGGGGSGGGGSGGGGGGGGSGGGGSHHHHHH
SEQ ID NO 177: SEQ ID NO 3 + A892P + D614N + N532P + S884C + A893C
MFVFLVLLPLVSSQCVNLTTRTQLPPAYTNSFTRGVYYPDKVFRSSVLHSTQDLFLPFFSNVTWF
HAIHVSGTNGTKRFDNPVLPFNDGVYFASTEKSNIIRGWIFGTTLDSKTQSLLIVNNATNVVIKV
CEFQFCNDPFLGVYYHKNNKSWMESEFRVYSSANNCTFEYVSQPFLMDLEGKQGNFKNLREFVFK
NIDGYFKIYSKHTPINLVRDLPQGFSALEPLVDLPIGINITRFQTLLALHRSYLTPGDSSSGWTA
GAAAYYVGYLQPRTFLLKYNENGTITDAVDCALDPLSETKCTLKSFTVEKGIYQTSNFRVQPTES
IVRFPNITNLCPFGEVFNATRFASVYAWNRKRISNCVADYSVLYNSASFSTFKCYGVSPTKLNDL
CFTNVYADSFVIRGDEVRQIAPGQTGKIADYNYKLPDDFTGCVIAWNSNNLDSKVGGNYNYLYRL
FRKSNLKPFERDISTEIYQAGSTPCNGVEGFNCYFPLQSYGFQPTNGVGYQPYRVVVLSFELLHA
PATVCGPKKSTPLVKNKCVNFNFNGLTGTGVLTESNKKFLPFQQFGRDIADTTDAVRDPQTLEIL
DITPCSFGGVSVITPGTNTSNQVAVLYQNVNCTEVPVAIHADQLTPTWRVYSTGSNVFQTRAGCL
IGAEHVNNSYECDIPIGAGICASYQTQTNSPSRAGSVASQSIIAYTMSLGAENSVAYSNNSIAIP
TNFTISVTTEILPVSMTKTSVDCTMYICGDSTECSNLLLQYGSFCTQLNRALTGIAVEQDKNTQE
VFAQVKQIYKTPPIKDFGGFNFSQILPDPSKPSKRSFIEDLLFNKVTLADAGFIKQYGDCLGDIA
ARDLICAQKFNGLTVLPPLLTDEMIAQYTSALLAGTITCGWTFGAGPCLQIPFAMQMAYRFNGIG
VTQNVLYENQKLIANQFNSAIGKIQDSLSSTASALGKLQDVVNQNAQALNTLVKQLSSNFGAISS
VLNDILSRLDPPEAEVQIDRLITGRLQSLQTYVTQQLIRAAEIRASANLAATKMSECVLGQSKRV
DFCGKGYHLMSFPQSAPHGVVFLHVTYVPAQEKNFTTAPAICHDGKAHFPREGVFVSNGTHWFVT
QRNFYEPQIITTDNTFVSGNCDVVIGIVNNTVYDPLQPELDSFKEELDKYFKNHTSPDVDLGDIS
GINASVVNIQKEIDRLNEVAKNLNESLIDLQELGKYEQGSGYIPEAPRDGQAYVRKDGEWVLLST
FLGRSLEVLFQGPGSLPETGGGSDYKDDDDKGGGGSGGGGSGGGGSGGGGSGGGGSHHHHHH
SEQ ID NO 178: SEQ ID NO 3 + A892P + T572I +
N532P + G880C + F888C
MFVFLVLLPLVSSQCVNLTTRTQLPPAYTNSFTRGVYYPDKVFRSSVLHSTQDLFLPFFSNVTWF
HAIHVSGTNGTKRFDNPVLPFNDGVYFASTEKSNIIRGWIFGTTLDSKTQSLLIVNNATNVVIKV
CEFQFCNDPFLGVYYHKNNKSWMESEFRVYSSANNCTFEYVSQPFLMDLEGKQGNFKNLREFVFK
NIDGYFKIYSKHTPINLVRDLPQGFSALEPLVDLPIGINITRFQTLLALHRSYLTPGDSSSGWTA
GAAAYYVGYLQPRTFLLKYNENGTITDAVDCALDPLSETKCTLKSFTVEKGIYQTSNFRVQPTES
IVRFPNITNLCPFGEVFNATRFASVYAWNRKRISNCVADYSVLYNSASFSTFKCYGVSPTKLNDL
CFTNVYADSFVIRGDEVRQIAPGQTGKIADYNYKLPDDFTGCVIAWNSNNLDSKVGGNYNYLYRL
FRKSNLKPFERDISTEIYQAGSTPCNGVEGFNCYFPLQSYGFQPTNGVGYQPYRVVVLSFELLHA
PATVCGPKKSTPLVKNKCVNFNFNGLTGTGVLTESNKKFLPFQQFGRDIADITDAVRDPQTLEIL
DITPCSFGGVSVITPGTNTSNQVAVLYQDVNCTEVPVAIHADQLTPTWRVYSTGSNVFQTRAGCL
IGAEHVNNSYECDIPIGAGICASYQTQTNSPSRAGSVASQSIIAYTMSLGAENSVAYSNNSIAIP
TNFTISVTTEILPVSMTKTSVDCTMYICGDSTECSNLLLQYGSFCTQLNRALTGIAVEQDKNTQE
VFAQVKQIYKTPPIKDFGGFNFSQILPDPSKPSKRSFIEDLLFNKVTLADAGFIKQYGDCLGDIA
ARDLICAQKFNGLTVLPPLLTDEMIAQYTSALLACTITSGWTCGAGPALQIPFAMQMAYRFNGIG
VTQNVLYENQKLIANQFNSAIGKIQDSLSSTASALGKLQDVVNQNAQALNTLVKQLSSNFGAISS
VLNDILSRLDPPEAEVQIDRLITGRLQSLQTYVTQQLIRAAEIRASANLAATKMSECVLGQSKRV
DFCGKGYHLMSFPQSAPHGVVFLHVTYVPAQEKNFTTAPAICHDGKAHFPREGVFVSNGTHWFVT
QRNFYEPQIITTDNTFVSGNCDVVIGIVNNTVYDPLQPELDSFKEELDKYFKNHTSPDVDLGDIS
GINASVVNIQKEIDRLNEVAKNLNESLIDLQELGKYEQGSGYIPEAPRDGQAYVRKDGEWVLLST
FLGRSLEVLFQGPGSLPETGGGSDYKDDDDKGGGGSGGGGSGGGGSGGGGSGGGGSHHHHHH
SEQ ID NO 179: SEQ ID NO 3 + A892P + T572I +
N532P + S884C + A893C
MFVFLVLLPLVSSQCVNLTTRTQLPPAYTNSFTRGVYYPDKVFRSSVLHSTQDLFLPFFSNVTWF
HAIHVSGTNGTKRFDNPVLPFNDGVYFASTEKSNIIRGWIFGTTLDSKTQSLLIVNNATNVVIKV
CEFQFCNDPFLGVYYHKNNKSWMESEFRVYSSANNCTFEYVSQPFLMDLEGKQGNFKNLREFVFK
NIDGYFKIYSKHTPINLVRDLPQGFSALEPLVDLPIGINITRFQTLLALHRSYLTPGDSSSGWTA
GAAAYYVGYLQPRTFLLKYNENGTITDAVDCALDPLSETKCTLKSFTVEKGIYQTSNFRVQPTES
IVRFPNITNLCPFGEVFNATRFASVYAWNRKRISNCVADYSVLYNSASFSTFKCYGVSPTKLNDL
CFTNVYADSFVIRGDEVRQIAPGQTGKIADYNYKLPDDFTGCVIAWNSNNLDSKVGGNYNYLYRL
FRKSNLKPFERDISTEIYQAGSTPCNGVEGFNCYFPLQSYGFQPTNGVGYQPYRVVVLSFELLHA
PATVCGPKKSTPLVKNKCVNFNFNGLTGTGVLTESNKKFLPFQQFGRDIADITDAVRDPQTLEIL
DITPCSFGGVSVITPGTNTSNQVAVLYQDVNCTEVPVAIHADQLTPTWRVYSTGSNVFQTRAGCL
IGAEHVNNSYECDIPIGAGICASYQTQTNSPSRAGSVASQSIIAYTMSLGAENSVAYSNNSIAIP
TNFTISVTTEILPVSMTKTSVDCTMYICGDSTECSNLLLQYGSFCTQLNRALTGIAVEQDKNTQE
VFAQVKQIYKTPPIKDFGGFNFSQILPDPSKPSKRSFIEDLLFNKVTLADAGFIKQYGDCLGDIA
ARDLICAQKFNGLTVLPPLLTDEMIAQYTSALLAGTITCGWTFGAGPCLQIPFAMQMAYRFNGIG
VTQNVLYENQKLIANQFNSAIGKIQDSLSSTASALGKLQDVVNQNAQALNTLVKQLSSNFGAISS
VLNDILSRLDPPEAEVQIDRLITGRLQSLQTYVTQQLIRAAEIRASANLAATKMSECVLGQSKRV
DFCGKGYHLMSFPQSAPHGVVFLHVTYVPAQEKNFTTAPAICHDGKAHFPREGVFVSNGTHWFVT
QRNFYEPQIITTDNTFVSGNCDVVIGIVNNTVYDPLQPELDSFKEELDKYFKNHTSPDVDLGDIS
GINASVVNIQKEIDRLNEVAKNLNESLIDLQELGKYEQGSGYIPEAPRDGQAYVRKDGEWVLLST
FLGRSLEVLFQGPGSLPETGGGSDYKDDDDKGGGGSGGGGSGGGGSGGGGSGGGGSHHHHHH
SEQ ID NO 180: SEQ ID NO 3 + D614N + T572I +
N532P + G880C + F888C
MFVFLVLLPLVSSQCVNLTTRTQLPPAYTNSFTRGVYYPDKVFRSSVLHSTQDLFLPFFSNVTWF
HAIHVSGTNGTKRFDNPVLPFNDGVYFASTEKSNIIRGWIFGTTLDSKTQSLLIVNNATNVVIKV
CEFQFCNDPFLGVYYHKNNKSWMESEFRVYSSANNCTFEYVSQPFLMDLEGKQGNFKNLREFVFK
NIDGYFKIYSKHTPINLVRDLPQGFSALEPLVDLPIGINITRFQTLLALHRSYLTPGDSSSGWTA
GAAAYYVGYLQPRTFLLKYNENGTITDAVDCALDPLSETKCTLKSFTVEKGIYQTSNFRVQPTES
IVRFPNITNLCPFGEVFNATRFASVYAWNRKRISNCVADYSVLYNSASFSTFKCYGVSPTKLNDL
CFTNVYADSFVIRGDEVRQIAPGQTGKIADYNYKLPDDFTGCVIAWNSNNLDSKVGGNYNYLYRL
FRKSNLKPFERDISTEIYQAGSTPCNGVEGFNCYFPLQSYGFQPTNGVGYQPYRVVVLSFELLHA
PATVCGPKKSTPLVKNKCVNFNFNGLTGTGVLTESNKKFLPFQQFGRDIADITDAVRDPQTLEIL
DITPCSFGGVSVITPGTNTSNQVAVLYQNVNCTEVPVAIHADQLTPTWRVYSTGSNVFQTRAGCL
IGAEHVNNSYECDIPIGAGICASYQTQTNSPSRAGSVASQSIIAYTMSLGAENSVAYSNNSIAIP
TNFTISVTTEILPVSMTKTSVDCTMYICGDSTECSNLLLQYGSFCTQLNRALTGIAVEQDKNTQE
VFAQVKQIYKTPPIKDFGGFNFSQILPDPSKPSKRSFIEDLLFNKVTLADAGFIKQYGDCLGDIA
ARDLICAQKFNGLTVLPPLLTDEMIAQYTSALLACTITSGWTCGAGAALQIPFAMQMAYRFNGIG
VTQNVLYENQKLIANQFNSAIGKIQDSLSSTASALGKLQDVVNQNAQALNTLVKQLSSNFGAISS
VLNDILSRLDPPEAEVQIDRLITGRLQSLQTYVTQQLIRAAEIRASANLAATKMSECVLGQSKRV
DFCGKGYHLMSFPQSAPHGVVFLHVTYVPAQEKNFTTAPAICHDGKAHFPREGVFVSNGTHWFVT
QRNFYEPQIITTDNTFVSGNCDVVIGIVNNTVYDPLQPELDSFKEELDKYFKNHTSPDVDLGDIS
GINASVVNIQKEIDRLNEVAKNLNESLIDLQELGKYEQGSGYIPEAPRDGQAYVRKDGEWVLLST
FLGRSLEVLFQGPGSLPETGGGSDYKDDDDKGGGGSGGGGSGGGGSGGGGSGGGGSHHHHHH
SEQ ID NO 181: SEQ ID NO 3 + D614N + T572I +
N532P + S884C + A893C
MFVFLVLLPLVSSQCVNLTTRTQLPPAYTNSFTRGVYYPDKVFRSSVLHSTQDLFLPFFSNVTWF
HAIHVSGTNGTKRFDNPVLPFNDGVYFASTEKSNIIRGWIFGTTLDSKTQSLLIVNNATNVVIKV
CEFQFCNDPFLGVYYHKNNKSWMESEFRVYSSANNCTFEYVSQPFLMDLEGKQGNFKNLREFVFK
NIDGYFKIYSKHTPINLVRDLPQGFSALEPLVDLPIGINITRFQTLLALHRSYLTPGDSSSGWTA
GAAAYYVGYLQPRTFLLKYNENGTITDAVDCALDPLSETKCTLKSFTVEKGIYQTSNFRVQPTES
IVRFPNITNLCPFGEVFNATRFASVYAWNRKRISNCVADYSVLYNSASFSTFKCYGVSPTKLNDL
CFTNVYADSFVIRGDEVRQIAPGQTGKIADYNYKLPDDFTGCVIAWNSNNLDSKVGGNYNYLYRL
FRKSNLKPFERDISTEIYQAGSTPCNGVEGFNCYFPLQSYGFQPTNGVGYQPYRVVVLSFELLHA
PATVCGPKKSTPLVKNKCVNFNFNGLTGTGVLTESNKKFLPFQQFGRDIADITDAVRDPQTLEIL
DITPCSFGGVSVITPGTNTSNQVAVLYQNVNCTEVPVAIHADQLTPTWRVYSTGSNVFQTRAGCL
IGAEHVNNSYECDIPIGAGICASYQTQTNSPSRAGSVASQSIIAYTMSLGAENSVAYSNNSIAIP
TNFTISVTTEILPVSMTKTSVDCTMYICGDSTECSNLLLQYGSFCTQLNRALTGIAVEQDKNTQE
VFAQVKQIYKTPPIKDFGGFNFSQILPDPSKPSKRSFIEDLLFNKVTLADAGFIKQYGDCLGDIA
ARDLICAQKFNGLTVLPPLLTDEMIAQYTSALLAGTITCGWTFGAGACLQIPFAMQMAYRFNGIG
VTQNVLYENQKLIANQFNSAIGKIQDSLSSTASALGKLQDVVNQNAQALNTLVKQLSSNFGAISS
VLNDILSRLDPPEAEVQIDRLITGRLQSLQTYVTQQLIRAAEIRASANLAATKMSECVLGQSKRV
DFCGKGYHLMSFPQSAPHGVVFLHVTYVPAQEKNFTTAPAICHDGKAHFPREGVFVSNGTHWFVT
QRNFYEPQIITTDNTFVSGNCDVVIGIVNNTVYDPLQPELDSFKEELDKYFKNHTSPDVDLGDIS
GINASVVNIQKEIDRLNEVAKNLNESLIDLQELGKYEQGSGYIPEAPRDGQAYVRKDGEWVLLST
FLGRSLEVLFQGPGSLPETGGGSDYKDDDDKGGGGSGGGGSGGGGSGGGGGGGGSHHHHHH
SEQ ID NO 182: SEQ ID NO 3 + A942P + A892P + D614N + T572I +
N532P
MFVFLVLLPLVSSQCVNLTTRTQLPPAYTNSFTRGVYYPDKVFRSSVLHSTQDLFLPFFSNVTWF
HAIHVSGTNGTKRFDNPVLPFNDGVYFASTEKSNIIRGWIFGTTLDSKTQSLLIVNNATNVVIKV
CEFQFCNDPFLGVYYHKNNKSWMESEFRVYSSANNCTFEYVSQPFLMDLEGKQGNFKNLREFVFK
NIDGYFKIYSKHTPINLVRDLPQGFSALEPLVDLPIGINITRFQTLLALHRSYLTPGDSSSGWTA
GAAAYYVGYLQPRTFLLKYNENGTITDAVDCALDPLSETKCTLKSFTVEKGIYQTSNFRVQPTES
IVRFPNITNLCPFGEVFNATRFASVYAWNRKRISNCVADYSVLYNSASFSTFKCYGVSPTKLNDL
CFTNVYADSFVIRGDEVRQIAPGQTGKIADYNYKLPDDFTGCVIAWNSNNLDSKVGGNYNYLYRL
FRKSNLKPFERDISTEIYQAGSTPCNGVEGFNCYFPLQSYGFQPTNGVGYQPYRVVVLSFELLHA
PATVCGPKKSTPLVKNKCVNFNFNGLTGTGVLTESNKKFLPFQQFGRDIADITDAVRDPQTLEIL
DITPCSFGGVSVITPGTNTSNQVAVLYQNVNCTEVPVAIHADQLTPTWRVYSTGSNVFQTRAGCL
IGAEHVNNSYECDIPIGAGICASYQTQTNSPSRAGSVASQSIIAYTMSLGAENSVAYSNNSIAIP
TNFTISVTTEILPVSMTKTSVDCTMYICGDSTECSNLLLQYGSFCTQLNRALTGIAVEQDKNTQE
VFAQVKQIYKTPPIKDFGGFNFSQILPDPSKPSKRSFIEDLLFNKVTLADAGFIKQYGDCLGDIA
ARDLICAQKFNGLTVLPPLLTDEMIAQYTSALLAGTITSGWTFGAGPALQIPFAMQMAYRFNGIG
VTQNVLYENQKLIANQFNSAIGKIQDSLSSTPSALGKLQDVVNQNAQALNTLVKQLSSNFGAISS
VLNDILSRLDPPEAEVQIDRLITGRLQSLQTYVTQQLIRAAEIRASANLAATKMSECVLGQSKRV
DFCGKGYHLMSFPQSAPHGVVFLHVTYVPAQEKNFTTAPAICHDGKAHFPREGVFVSNGTHWFVT
QRNFYEPQIITTDNTFVSGNCDVVIGIVNNTVYDPLQPELDSFKEELDKYFKNHTSPDVDLGDIS
GINASVVNIQKEIDRLNEVAKNLNESLIDLQELGKYEQGSGYIPEAPRDGQAYVRKDGEWVLLST
FLGRSLEVLFQGPGSLPETGGGSDYKDDDDKGGGGSGGGGSGGGGSGGGGSGGGGSHHHHHH
SEQ ID NO 183: SEQ ID NO 3 + A942P + A892P + D614N + T572I +
G880C + F888C
MFVFLVLLPLVSSQCVNLTTRTQLPPAYTNSFTRGVYYPDKVFRSSVLHSTQDLFLPFFSNVTWF
HAIHVSGTNGTKRFDNPVLPFNDGVYFASTEKSNIIRGWIFGTTLDSKTQSLLIVNNATNVVIKV
CEFQFCNDPFLGVYYHKNNKSWMESEFRVYSSANNCTFEYVSQPFLMDLEGKQGNFKNLREFVFK
NIDGYFKIYSKHTPINLVRDLPQGFSALEPLVDLPIGINITRFQTLLALHRSYLTPGDSSSGWTA
GAAAYYVGYLQPRTFLLKYNENGTITDAVDCALDPLSETKCTLKSFTVEKGIYQTSNFRVQPTES
IVRFPNITNLCPFGEVFNATRFASVYAWNRKRISNCVADYSVLYNSASFSTFKCYGVSPTKLNDL
CFTNVYADSFVIRGDEVRQIAPGQTGKIADYNYKLPDDFTGCVIAWNSNNLDSKVGGNYNYLYRL
FRKSNLKPFERDISTEIYQAGSTPCNGVEGFNCYFPLQSYGFQPTNGVGYQPYRVVVLSFELLHA
PATVCGPKKSTNLVKNKCVNFNFNGLTGTGVLTESNKKFLPFQQFGRDIADITDAVRDPQTLEIL
DITPCSFGGVSVITPGTNTSNQVAVLYQNVNCTEVPVAIHADQLTPTWRVYSTGSNVFQTRAGCL
IGAEHVNNSYECDIPIGAGICASYQTQTNSPSRAGSVASQSIIAYTMSLGAENSVAYSNNSIAIP
TNFTISVTTEILPVSMTKTSVDCTMYICGDSTECSNLLLQYGSFCTQLNRALTGIAVEQDKNTQE
VFAQVKQIYKTPPIKDFGGFNFSQILPDPSKPSKRSFIEDLLFNKVTLADAGFIKQYGDCLGDIA
ARDLICAQKFNGLTVLPPLLTDEMIAQYTSALLACTITSGWTCGAGPALQIPFAMQMAYRFNGIG
VTQNVLYENQKLIANQFNSAIGKIQDSLSSTPSALGKLQDVVNQNAQALNTLVKQLSSNFGAISS
VLNDILSRLDPPEAEVQIDRLITGRLQSLQTYVTQQLIRAAEIRASANLAATKMSECVLGQSKRV
DFCGKGYHLMSFPQSAPHGVVFLHVTYVPAQEKNFTTAPAICHDGKAHFPREGVFVSNGTHWFVT
QRNFYEPQIITTDNTFVSGNCDVVIGIVNNTVYDPLQPELDSFKEELDKYFKNHTSPDVDLGDIS
GINASVVNIQKEIDRLNEVAKNLNESLIDLQELGKYEQGSGYIPEAPRDGQAYVRKDGEWVLLST
FLGRSLEVLFQGPGSLPETGGGSDYKDDDDKGGGGSGGGGSGGGGGGGGSGGGGSHHHHHH
SEQ ID NO 184: SEQ ID NO 3 + A942P + A892P + D614N + T572I +
S884C + A893C
MFVFLVLLPLVSSQCVNLTTRTQLPPAYTNSFTRGVYYPDKVFRSSVLHSTQDLFLPFFSNVTWF
HAIHVSGTNGTKRFDNPVLPFNDGVYFASTEKSNIIRGWIFGTTLDSKTQSLLIVNNATNVVIKV
CEFQFCNDPFLGVYYHKNNKSWMESEFRVYSSANNCTFEYVSQPFLMDLEGKQGNFKNLREFVFK
NIDGYFKIYSKHTPINLVRDLPQGFSALEPLVDLPIGINITRFQTLLALHRSYLTPGDSSSGWTA
GAAAYYVGYLQPRTFLLKYNENGTITDAVDCALDPLSETKCTLKSFTVEKGIYQTSNFRVQPTES
IVRFPNITNLCPFGEVFNATRFASVYAWNRKRISNCVADYSVLYNSASFSTFKCYGVSPTKLNDL
CFTNVYADSFVIRGDEVRQIAPGQTGKIADYNYKLPDDFTGCVIAWNSNNLDSKVGGNYNYLYRL
FRKSNLKPFERDISTEIYQAGSTPCNGVEGFNCYFPLQSYGFQPTNGVGYQPYRVVVLSFELLHA
PATVCGPKKSTNLVKNKCVNFNFNGLTGTGVLTESNKKFLPFQQFGRDIADITDAVRDPQTLEIL
DITPCSFGGVSVITPGTNTSNQVAVLYQNVNCTEVPVAIHADQLTPTWRVYSTGSNVFQTRAGCL
IGAEHVNNSYECDIPIGAGICASYQTQTNSPSRAGSVASQSIIAYTMSLGAENSVAYSNNSIAIP
TNFTISVTTEILPVSMTKTSVDCTMYICGDSTECSNLLLQYGSFCTQLNRALTGIAVEQDKNTQE
VFAQVKQIYKTPPIKDFGGFNFSQILPDPSKPSKRSFIEDLLFNKVTLADAGFIKQYGDCLGDIA
ARDLICAQKFNGLTVLPPLLTDEMIAQYTSALLAGTITCGWTFGAGPCLQIPFAMQMAYRFNGIG
VTQNVLYENQKLIANQFNSAIGKIQDSLSSTPSALGKLQDVVNQNAQALNTLVKQLSSNFGAISS
VLNDILSRLDPPEAEVQIDRLITGRLQSLQTYVTQQLIRAAEIRASANLAATKMSECVLGQSKRV
DFCGKGYHLMSFPQSAPHGVVFLHVTYVPAQEKNFTTAPAICHDGKAHFPREGVFVSNGTHWFVT
QRNFYEPQIITTDNTFVSGNCDVVIGIVNNTVYDPLQPELDSFKEELDKYFKNHTSPDVDLGDIS
GINASVVNIQKEIDRLNEVAKNLNESLIDLQELGKYEQGSGYIPEAPRDGQAYVRKDGEWVLLST
FLGRSLEVLFQGPGSLPETGGGSDYKDDDDKGGGGSGGGGSGGGGSGGGGSGGGGSHHHHHH
SEQ ID NO 185: SEQ ID NO 3 + A942P + A892P + D614N + N532P + G880C + F888C
MFVFLVLLPLVSSQCVNLTTRTQLPPAYTNSFTRGVYYPDKVFRSSVLHSTQDLFLPFFSNVTWF
HAIHVSGTNGTKRFDNPVLPFNDGVYFASTEKSNIIRGWIFGTTLDSKTQSLLIVNNATNVVIKV
CEFQFCNDPFLGVYYHKNNKSWMESEFRVYSSANNCTFEYVSQPFLMDLEGKQGNFKNLREFVFK
NIDGYFKIYSKHTPINLVRDLPQGFSALEPLVDLPIGINITRFQTLLALHRSYLTPGDSSSGWTA
GAAAYYVGYLQPRTFLLKYNENGTITDAVDCALDPLSETKCTLKSFTVEKGIYQTSNFRVQPTES
IVRFPNITNLCPFGEVFNATRFASVYAWNRKRISNCVADYSVLYNSASFSTFKCYGVSPTKLNDL
CFTNVYADSFVIRGDEVRQIAPGQTGKIADYNYKLPDDFTGCVIAWNSNNLDSKVGGNYNYLYRL
FRKSNLKPFERDISTEIYQAGSTPCNGVEGFNCYFPLQSYGFQPTNGVGYQPYRVVVLSFELLHA
PATVCGPKKSTPLVKNKCVNFNFNGLTGTGVLTESNKKFLPFQQFGRDIADTTDAVRDPQTLEIL
DITPCSFGGVSVITPGTNTSNQVAVLYQNVNCTEVPVAIHADQLTPTWRVYSTGSNVFQTRAGCL
IGAEHVNNSYECDIPIGAGICASYQTQTNSPSRAGSVASQSIIAYTMSLGAENSVAYSNNSIAIP
TNFTISVTTEILPVSMTKTSVDCTMYICGDSTECSNLLLQYGSFCTQLNRALTGIAVEQDKNTQE
VFAQVKQIYKTPPIKDFGGFNFSQILPDPSKPSKRSFIEDLLFNKVTLADAGFIKQYGDCLGDIA
ARDLICAQKFNGLTVLPPLLTDEMIAQYTSALLACTITSGWTCGAGPALQIPFAMQMAYRFNGIG
VTQNVLYENQKLIANQFNSAIGKIQDSLSSTPSALGKLQDVVNQNAQALNTLVKQLSSNFGAISS
VLNDILSRLDPPEAEVQIDRLITGRLQSLQTYVTQQLIRAAEIRASANLAATKMSECVLGQSKRV
DFCGKGYHLMSFPQSAPHGVVFLHVTYVPAQEKNFTTAPAICHDGKAHFPREGVFVSNGTHWFVT
QRNFYEPQIITTDNTFVSGNCDVVIGIVNNTVYDPLQPELDSFKEELDKYFKNHTSPDVDLGDIS
GINASVVNIQKEIDRLNEVAKNLNESLIDLQELGKYEQGSGYIPEAPRDGQAYVRKDGEWVLLST
FLGRSLEVLFQGPGSLPETGGGSDYKDDDDKGGGGSGGGGSGGGGSGGGGSGGGGSHHHHHH
SEQ ID NO 186: SEQ ID NO 3 + A942P + A892P + D614N + N532P + S884C + A893C
MFVFLVLLPLVSSQCVNLTTRTQLPPAYTNSFTRGVYYPDKVFRSSVLHSTQDLFLPFFSNVTWF
HAIHVSGTNGTKRFDNPVLPFNDGVYFASTEKSNIIRGWIFGTTLDSKTQSLLIVNNATNVVIKV
CEFQFCNDPFLGVYYHKNNKSWMESEFRVYSSANNCTFEYVSQPFLMDLEGKQGNFKNLREFVFK
NIDGYFKIYSKHTPINLVRDLPQGFSALEPLVDLPIGINITRFQTLLALHRSYLTPGDSSSGWTA
GAAAYYVGYLQPRTFLLKYNENGTITDAVDCALDPLSETKCTLKSFTVEKGIYQTSNFRVQPTES
IVRFPNITNLCPFGEVFNATRFASVYAWNRKRISNCVADYSVLYNSASFSTFKCYGVSPTKLNDL
CFTNVYADSFVIRGDEVRQIAPGQTGKIADYNYKLPDDFTGCVIAWNSNNLDSKVGGNYNYLYRL
FRKSNLKPFERDISTEIYQAGSTPCNGVEGFNCYFPLQSYGFQPTNGVGYQPYRVVVLSFELLHA
PATVCGPKKSTPLVKNKCVNFNFNGLTGTGVLTESNKKFLPFQQFGRDIADTTDAVRDPQTLEIL
DITPCSFGGVSVITPGTNTSNQVAVLYQNVNCTEVPVAIHADQLTPTWRVYSTGSNVFQTRAGCL
IGAEHVNNSYECDIPIGAGICASYQTQTNSPSRAGSVASQSIIAYTMSLGAENSVAYSNNSIAIP
TNFTISVTTEILPVSMTKTSVDCTMYICGDSTECSNLLLQYGSFCTQLNRALTGIAVEQDKNTQE
VFAQVKQIYKTPPIKDFGGFNFSQILPDPSKPSKRSFIEDLLFNKVTLADAGFIKQYGDCLGDIA
ARDLICAQKFNGLTVLPPLLTDEMIAQYTSALLAGTITCGWTFGAGPCLQIPFAMQMAYRFNGIG
VTQNVLYENQKLIANQFNSAIGKIQDSLSSTPSALGKLQDVVNQNAQALNTLVKQLSSNFGAISS
VLNDILSRLDPPEAEVQIDRLITGRLQSLQTYVTQQLIRAAEIRASANLAATKMSECVLGQSKRV
DFCGKGYHLMSFPQSAPHGVVFLHVTYVPAQEKNFTTAPAICHDGKAHFPREGVFVSNGTHWFVT
QRNFYEPQIITTDNTFVSGNCDVVIGIVNNTVYDPLQPELDSFKEELDKYFKNHTSPDVDLGDIS
GINASVVNIQKEIDRLNEVAKNLNESLIDLQELGKYEQGSGYIPEAPRDGQAYVRKDGEWVLLST
FLGRSLEVLFQGPGSLPETGGGSDYKDDDDKGGGGSGGGGSGGGGSGGGGSGGGGSHHHHHH
SEQ ID NO 187: SEQ ID NO 3 + A942P + A892P + T572I +
N532P + G880C + F888C
MFVFLVLLPLVSSQCVNLTTRTQLPPAYTNSFTRGVYYPDKVFRSSVLHSTQDLFLPFFSNVTWF
HAIHVSGTNGTKRFDNPVLPFNDGVYFASTEKSNIIRGWIFGTTLDSKTQSLLIVNNATNVVIKV
CEFQFCNDPFLGVYYHKNNKSWMESEFRVYSSANNCTFEYVSQPFLMDLEGKQGNFKNLREFVFK
NIDGYFKIYSKHTPINLVRDLPQGFSALEPLVDLPIGINITRFQTLLALHRSYLTPGDSSSGWTA
GAAAYYVGYLQPRTFLLKYNENGTITDAVDCALDPLSETKCTLKSFTVEKGIYQTSNFRVQPTES
IVRFPNITNLCPFGEVFNATRFASVYAWNRKRISNCVADYSVLYNSASFSTFKCYGVSPTKLNDL
CFTNVYADSFVIRGDEVRQIAPGQTGKIADYNYKLPDDFTGCVIAWNSNNLDSKVGGNYNYLYRL
FRKSNLKPFERDISTEIYQAGSTPCNGVEGFNCYFPLQSYGFQPTNGVGYQPYRVVVLSFELLHA
PATVCGPKKSTPLVKNKCVNFNFNGLTGTGVLTESNKKFLPFQQFGRDIADITDAVRDPQTLEIL
DITPCSFGGVSVITPGTNTSNQVAVLYQDVNCTEVPVAIHADQLTPTWRVYSTGSNVFQTRAGCL
IGAEHVNNSYECDIPIGAGICASYQTQTNSPSRAGSVASQSIIAYTMSLGAENSVAYSNNSIAIP
TNFTISVTTEILPVSMTKTSVDCTMYICGDSTECSNLLLQYGSFCTQLNRALTGIAVEQDKNTQE
VFAQVKQIYKTPPIKDFGGFNFSQILPDPSKPSKRSFIEDLLFNKVTLADAGFIKQYGDCLGDIA
ARDLICAQKFNGLTVLPPLLTDEMIAQYTSALLACTITSGWTCGAGPALQIPFAMQMAYRFNGIG
VTQNVLYENQKLIANQFNSAIGKIQDSLSSTPSALGKLQDVVNQNAQALNTLVKQLSSNFGAISS
VLNDILSRLDPPEAEVQIDRLITGRLQSLQTYVTQQLIRAAEIRASANLAATKMSECVLGQSKRV
DFCGKGYHLMSFPQSAPHGVVFLHVTYVPAQEKNFTTAPAICHDGKAHFPREGVFVSNGTHWFVT
QRNFYEPQIITTDNTFVSGNCDVVIGIVNNTVYDPLQPELDSFKEELDKYFKNHTSPDVDLGDIS
GINASVVNIQKEIDRLNEVAKNLNESLIDLQELGKYEQGSGYIPEAPRDGQAYVRKDGEWVLLST
FLGRSLEVLFQGPGSLPETGGGSDYKDDDDKGGGGSGGGGSGGGGSGGGGSGGGGSHHHHHH
SEQ ID NO 188: SEQ ID NO 3 + A942P + A892P + T572I +
N532P + S884C + A893C
MFVFLVLLPLVSSQCVNLTTRTQLPPAYTNSFTRGVYYPDKVFRSSVLHSTQDLFLPFFSNVTWF
HAIHVSGTNGTKRFDNPVLPFNDGVYFASTEKSNIIRGWIFGTTLDSKTQSLLIVNNATNVVIKV
CEFQFCNDPFLGVYYHKNNKSWMESEFRVYSSANNCTFEYVSQPFLMDLEGKQGNFKNLREFVFK
NIDGYFKIYSKHTPINLVRDLPQGFSALEPLVDLPIGINITRFQTLLALHRSYLTPGDSSSGWTA
GAAAYYVGYLQPRTFLLKYNENGTITDAVDCALDPLSETKCTLKSFTVEKGIYQTSNFRVQPTES
IVRFPNITNLCPFGEVFNATRFASVYAWNRKRISNCVADYSVLYNSASFSTFKCYGVSPTKLNDL
CFTNVYADSFVIRGDEVRQIAPGQTGKIADYNYKLPDDFTGCVIAWNSNNLDSKVGGNYNYLYRL
FRKSNLKPFERDISTEIYQAGSTPCNGVEGFNCYFPLQSYGFQPTNGVGYQPYRVVVLSFELLHA
PATVCGPKKSTPLVKNKCVNFNFNGLTGTGVLTESNKKFLPFQQFGRDIADITDAVRDPQTLEIL
DITPCSFGGVSVITPGTNTSNQVAVLYQDVNCTEVPVAIHADQLTPTWRVYSTGSNVFQTRAGCL
IGAEHVNNSYECDIPIGAGICASYQTQTNSPSRAGSVASQSIIAYTMSLGAENSVAYSNNSIAIP
TNFTISVTTEILPVSMTKTSVDCTMYICGDSTECSNLLLQYGSFCTQLNRALTGIAVEQDKNTQE
VFAQVKQIYKTPPIKDFGGFNFSQILPDPSKPSKRSFIEDLLFNKVTLADAGFIKQYGDCLGDIA
ARDLICAQKFNGLTVLPPLLTDEMIAQYTSALLAGTITCGWTFGAGPCLQIPFAMQMAYRFNGIG
VTQNVLYENQKLIANQFNSAIGKIQDSLSSTPSALGKLQDVVNQNAQALNTLVKQLSSNFGAISS
VLNDILSRLDPPEAEVQIDRLITGRLQSLQTYVTQQLIRAAEIRASANLAATKMSECVLGQSKRV
DFCGKGYHLMSFPQSAPHGVVFLHVTYVPAQEKNFTTAPAICHDGKAHFPREGVFVSNGTHWFVT
QRNFYEPQIITTDNTFVSGNCDVVIGIVNNTVYDPLQPELDSFKEELDKYFKNHTSPDVDLGDIS
GINASVVNIQKEIDRLNEVAKNLNESLIDLQELGKYEQGSGYIPEAPRDGQAYVRKDGEWVLLST
FLGRSLEVLFQGPGSLPETGGGSDYKDDDDKGGGGSGGGGSGGGGSGGGGSGGGGSHHHHHH
SEQ ID NO 189: SEQ ID NO 3 + A942P + D614N + T572I +
N532P + G880C + F888C
MFVFLVLLPLVSSQCVNLTTRTQLPPAYTNSFTRGVYYPDKVFRSSVLHSTQDLFLPFFSNVTWF
HAIHVSGTNGTKRFDNPVLPFNDGVYFASTEKSNIIRGWIFGTTLDSKTQSLLIVNNATNVVIKV
CEFQFCNDPFLGVYYHKNNKSWMESEFRVYSSANNCTFEYVSQPFLMDLEGKQGNFKNLREFVFK
NIDGYFKIYSKHTPINLVRDLPQGFSALEPLVDLPIGINITRFQTLLALHRSYLTPGDSSSGWTA
GAAAYYVGYLQPRTFLLKYNENGTITDAVDCALDPLSETKCTLKSFTVEKGIYQTSNFRVQPTES
IVRFPNITNLCPFGEVFNATRFASVYAWNRKRISNCVADYSVLYNSASFSTFKCYGVSPTKLNDL
CFTNVYADSFVIRGDEVRQIAPGQTGKIADYNYKLPDDFTGCVIAWNSNNLDSKVGGNYNYLYRL
FRKSNLKPFERDISTEIYQAGSTPCNGVEGFNCYFPLQSYGFQPTNGVGYQPYRVVVLSFELLHA
PATVCGPKKSTPLVKNKCVNFNFNGLTGTGVLTESNKKFLPFQQFGRDIADITDAVRDPQTLEIL
DITPCSFGGVSVITPGTNTSNQVAVLYQNVNCTEVPVAIHADQLTPTWRVYSTGSNVFQTRAGCL
IGAEHVNNSYECDIPIGAGICASYQTQTNSPSRAGSVASQSIIAYTMSLGAENSVAYSNNSIAIP
TNFTISVTTEILPVSMTKTSVDCTMYICGDSTECSNLLLQYGSFCTQLNRALTGIAVEQDKNTQE
VFAQVKQIYKTPPIKDFGGFNFSQILPDPSKPSKRSFIEDLLFNKVTLADAGFIKQYGDCLGDIA
ARDLICAQKFNGLTVLPPLLTDEMIAQYTSALLACTITSGWTCGAGAALQIPFAMQMAYRFNGIG
VTQNVLYENQKLIANQFNSAIGKIQDSLSSTPSALGKLQDVVNQNAQALNTLVKQLSSNFGAISS
VLNDILSRLDPPEAEVQIDRLITGRLQSLQTYVTQQLIRAAEIRASANLAATKMSECVLGQSKRV
DFCGKGYHLMSFPQSAPHGVVFLHVTYVPAQEKNFTTAPAICHDGKAHFPREGVFVSNGTHWFVT
QRNFYEPQIITTDNTFVSGNCDVVIGIVNNTVYDPLQPELDSFKEELDKYFKNHTSPDVDLGDIS
GINASVVNIQKEIDRLNEVAKNLNESLIDLQELGKYEQGSGYIPEAPRDGQAYVRKDGEWVLLST
FLGRSLEVLFQGPGSLPETGGGSDYKDDDDKGGGGSGGGGSGGGGSGGGGSGGGGSHHHHHH
SEQ ID NO 190: SEQ ID NO 3 + A942P + D614N + T572I +
N532P + S884C + A893C
MFVFLVLLPLVSSQCVNLTTRTQLPPAYTNSFTRGVYYPDKVFRSSVLHSTQDLFLPFFSNVTWF
HAIHVSGTNGTKRFDNPVLPFNDGVYFASTEKSNIIRGWIFGTTLDSKTQSLLIVNNATNVVIKV
CEFQFCNDPFLGVYYHKNNKSWMESEFRVYSSANNCTFEYVSQPFLMDLEGKQGNFKNLREFVFK
NIDGYFKIYSKHTPINLVRDLPQGFSALEPLVDLPIGINITRFQTLLALHRSYLTPGDSSSGWTA
GAAAYYVGYLQPRTFLLKYNENGTITDAVDCALDPLSETKCTLKSFTVEKGIYQTSNFRVQPTES
IVRFPNITNLCPFGEVFNATRFASVYAWNRKRISNCVADYSVLYNSASFSTFKCYGVSPTKLNDL
CFTNVYADSFVIRGDEVRQIAPGQTGKIADYNYKLPDDFTGCVIAWNSNNLDSKVGGNYNYLYRL
FRKSNLKPFERDISTEIYQAGSTPCNGVEGFNCYFPLQSYGFQPTNGVGYQPYRVVVLSFELLHA
PATVCGPKKSTPLVKNKCVNFNFNGLTGTGVLTESNKKFLPFQQFGRDIADITDAVRDPQTLEIL
DITPCSFGGVSVITPGTNTSNQVAVLYQNVNCTEVPVAIHADQLTPTWRVYSTGSNVFQTRAGCL
IGAEHVNNSYECDIPIGAGICASYQTQTNSPSRAGSVASQSIIAYTMSLGAENSVAYSNNSIAIP
TNFTISVTTEILPVSMTKTSVDCTMYICGDSTECSNLLLQYGSFCTQLNRALTGIAVEQDKNTQE
VFAQVKQIYKTPPIKDFGGFNFSQILPDPSKPSKRSFIEDLLFNKVTLADAGFIKQYGDCLGDIA
ARDLICAQKFNGLTVLPPLLTDEMIAQYTSALLAGTITCGWTFGAGACLQIPFAMQMAYRFNGIG
VTQNVLYENQKLIANQFNSAIGKIQDSLSSTPSALGKLQDVVNQNAQALNTLVKQLSSNFGAISS
VLNDILSRLDPPEAEVQIDRLITGRLQSLQTYVTQQLIRAAEIRASANLAATKMSECVLGQSKRV
DFCGKGYHLMSFPQSAPHGVVFLHVTYVPAQEKNFTTAPAICHDGKAHFPREGVFVSNGTHWFVT
QRNFYEPQIITTDNTFVSGNCDVVIGIVNNTVYDPLQPELDSFKEELDKYFKNHTSPDVDLGDIS
GINASVVNIQKEIDRLNEVAKNLNESLIDLQELGKYEQGSGYIPEAPRDGQAYVRKDGEWVLLST
FLGRSLEVLFQGPGSLPETGGGSDYKDDDDKGGGGSGGGGSGGGGSGGGGSGGGGSHHHHHH
SEQ ID NO 191: SEQ ID NO 3 + A892P + D614N + T572I +
N532P + G880C + F888C
MFVFLVLLPLVSSQCVNLTTRTQLPPAYTNSFTRGVYYPDKVFRSSVLHSTQDLFLPFFSNVTWF
HAIHVSGTNGTKRFDNPVLPFNDGVYFASTEKSNIIRGWIFGTTLDSKTQSLLIVNNATNVVIKV
CEFQFCNDPFLGVYYHKNNKSWMESEFRVYSSANNCTFEYVSQPFLMDLEGKQGNFKNLREFVFK
NIDGYFKIYSKHTPINLVRDLPQGFSALEPLVDLPIGINITRFQTLLALHRSYLTPGDSSSGWTA
GAAAYYVGYLQPRTFLLKYNENGTITDAVDCALDPLSETKCTLKSFTVEKGIYQTSNFRVQPTES
IVRFPNITNLCPFGEVFNATRFASVYAWNRKRISNCVADYSVLYNSASFSTFKCYGVSPTKLNDL
CFTNVYADSFVIRGDEVRQIAPGQTGKIADYNYKLPDDFTGCVIAWNSNNLDSKVGGNYNYLYRL
FRKSNLKPFERDISTEIYQAGSTPCNGVEGFNCYFPLQSYGFQPTNGVGYQPYRVVVLSFELLHA
PATVCGPKKSTPLVKNKCVNFNFNGLTGTGVLTESNKKFLPFQQFGRDIADITDAVRDPQTLEIL
DITPCSFGGVSVITPGTNTSNQVAVLYQNVNCTEVPVAIHADQLTPTWRVYSTGSNVFQTRAGCL
IGAEHVNNSYECDIPIGAGICASYQTQTNSPSRAGSVASQSIIAYTMSLGAENSVAYSNNSIAIP
TNFTISVTTEILPVSMTKTSVDCTMYICGDSTECSNLLLQYGSFCTQLNRALTGIAVEQDKNTQE
VFAQVKQIYKTPPIKDFGGFNFSQILPDPSKPSKRSFIEDLLFNKVTLADAGFIKQYGDCLGDIA
ARDLICAQKFNGLTVLPPLLTDEMIAQYTSALLACTITSGWTCGAGPALQIPFAMQMAYRFNGIG
VTQNVLYENQKLIANQFNSAIGKIQDSLSSTASALGKLQDVVNQNAQALNTLVKQLSSNFGAISS
VLNDILSRLDPPEAEVQIDRLITGRLQSLQTYVTQQLIRAAEIRASANLAATKMSECVLGQSKRV
DFCGKGYHLMSFPQSAPHGVVFLHVTYVPAQEKNFTTAPAICHDGKAHFPREGVFVSNGTHWFVT
QRNFYEPQIITTDNTFVSGNCDVVIGIVNNTVYDPLQPELDSFKEELDKYFKNHTSPDVDLGDIS
GINASVVNIQKEIDRLNEVAKNLNESLIDLQELGKYEQGSGYIPEAPRDGQAYVRKDGEWVLLST
FLGRSLEVLFQGPGSLPETGGGSDYKDDDDKGGGGSGGGGSGGGGSGGGGSGGGGSHHHHHH
SEQ ID NO 192: SEQ ID NO 3 + A892P + D614N + T572I +
N532P + S884C + A893C
MFVFLVLLPLVSSQCVNLTTRTQLPPAYTNSFTRGVYYPDKVFRSSVLHSTQDLFLPFFSNVTWF
HAIHVSGTNGTKRFDNPVLPFNDGVYFASTEKSNIIRGWIFGTTLDSKTQSLLIVNNATNVVIKV
CEFQFCNDPFLGVYYHKNNKSWMESEFRVYSSANNCTFEYVSQPFLMDLEGKQGNFKNLREFVFK
NIDGYFKIYSKHTPINLVRDLPQGFSALEPLVDLPIGINITRFQTLLALHRSYLTPGDSSSGWTA
GAAAYYVGYLQPRTFLLKYNENGTITDAVDCALDPLSETKCTLKSFTVEKGIYQTSNFRVQPTES
IVRFPNITNLCPFGEVFNATRFASVYAWNRKRISNCVADYSVLYNSASFSTFKCYGVSPTKLNDL
CFTNVYADSFVIRGDEVRQIAPGQTGKIADYNYKLPDDFTGCVIAWNSNNLDSKVGGNYNYLYRL
FRKSNLKPFERDISTEIYQAGSTPCNGVEGFNCYFPLQSYGFQPTNGVGYQPYRVVVLSFELLHA
PATVCGPKKSTPLVKNKCVNFNFNGLTGTGVLTESNKKFLPFQQFGRDIADITDAVRDPQTLEIL
DITPCSFGGVSVITPGTNTSNQVAVLYQNVNCTEVPVAIHADQLTPTWRVYSTGSNVFQTRAGCL
IGAEHVNNSYECDIPIGAGICASYQTQTNSPSRAGSVASQSIIAYTMSLGAENSVAYSNNSIAIP
TNFTISVTTEILPVSMTKTSVDCTMYICGDSTECSNLLLQYGSFCTQLNRALTGIAVEQDKNTQE
VFAQVKQIYKTPPIKDFGGFNFSQILPDPSKPSKRSFIEDLLFNKVTLADAGFIKQYGDCLGDIA
ARDLICAQKFNGLTVLPPLLTDEMIAQYTSALLAGTITCGWTFGAGPCLQIPFAMQMAYRFNGIG
VTQNVLYENQKLIANQFNSAIGKIQDSLSSTASALGKLQDVVNQNAQALNTLVKQLSSNFGAISS
VLNDILSRLDPPEAEVQIDRLITGRLQSLQTYVTQQLIRAAEIRASANLAATKMSECVLGQSKRV
DFCGKGYHLMSFPQSAPHGVVFLHVTYVPAQEKNFTTAPAICHDGKAHFPREGVFVSNGTHWFVT
QRNFYEPQIITTDNTFVSGNCDVVIGIVNNTVYDPLQPELDSFKEELDKYFKNHTSPDVDLGDIS
GINASVVNIQKEIDRLNEVAKNLNESLIDLQELGKYEQGSGYIPEAPRDGQAYVRKDGEWVLLST
FLGRSLEVLFQGPGSLPETGGGSDYKDDDDKGGGGSGGGGSGGGGSGGGGSGGGGSHHHHHH
SEQ ID NO 193: SEQ ID NO 3 + A942P + A892P + D614N + T572I +
N532P + G880C + F888C
MFVFLVLLPLVSSQCVNLTTRTQLPPAYTNSFTRGVYYPDKVFRSSVLHSTQDLFLPFFSNVTWF
HAIHVSGTNGTKRFDNPVLPFNDGVYFASTEKSNIIRGWIFGTTLDSKTQSLLIVNNATNVVIKV
CEFQFCNDPFLGVYYHKNNKSWMESEFRVYSSANNCTFEYVSQPFLMDLEGKQGNFKNLREFVFK
NIDGYFKIYSKHTPINLVRDLPQGFSALEPLVDLPIGINITRFQTLLALHRSYLTPGDSSSGWTA
GAAAYYVGYLQPRTFLLKYNENGTITDAVDCALDPLSETKCTLKSFTVEKGIYQTSNFRVQPTES
IVRFPNITNLCPFGEVFNATRFASVYAWNRKRISNCVADYSVLYNSASFSTFKCYGVSPTKLNDL
CFTNVYADSFVIRGDEVRQIAPGQTGKIADYNYKLPDDFTGCVIAWNSNNLDSKVGGNYNYLYRL
FRKSNLKPFERDISTEIYQAGSTPCNGVEGFNCYFPLQSYGFQPTNGVGYQPYRVVVLSFELLHA
PATVCGPKKSTPLVKNKCVNFNFNGLTGTGVLTESNKKFLPFQQFGRDIADITDAVRDPQTLEIL
DITPCSFGGVSVITPGTNTSNQVAVLYQNVNCTEVPVAIHADQLTPTWRVYSTGSNVFQTRAGCL
IGAEHVNNSYECDIPIGAGICASYQTQTNSPSRAGSVASQSIIAYTMSLGAENSVAYSNNSIAIP
TNFTISVTTEILPVSMTKTSVDCTMYICGDSTECSNLLLQYGSFCTQLNRALTGIAVEQDKNTQE
VFAQVKQIYKTPPIKDFGGFNFSQILPDPSKPSKRSFIEDLLFNKVTLADAGFIKQYGDCLGDIA
ARDLICAQKFNGLTVLPPLLTDEMIAQYTSALLACTITSGWTCGAGPALQIPFAMQMAYRFNGIG
VTQNVLYENQKLIANQFNSAIGKIQDSLSSTPSALGKLQDVVNQNAQALNTLVKQLSSNFGAISS
VLNDILSRLDPPEAEVQIDRLITGRLQSLQTYVTQQLIRAAEIRASANLAATKMSECVLGQSKRV
DFCGKGYHLMSFPQSAPHGVVFLHVTYVPAQEKNFTTAPAICHDGKAHFPREGVFVSNGTHWFVT
QRNFYEPQIITTDNTFVSGNCDVVIGIVNNTVYDPLQPELDSFKEELDKYFKNHTSPDVDLGDIS
GINASVVNIQKEIDRLNEVAKNLNESLIDLQELGKYEQGSGYIPEAPRDGQAYVRKDGEWVLLST
FLGRSLEVLFQGPGSLPETGGGSDYKDDDDKGGGGSGGGGSGGGGSGGGGSGGGGSHHHHHH
SEQ ID NO 194: SEQ ID NO 3 + A942P + A892P + D614N + T572I +
N532P + S884C + A893C
MFVFLVLLPLVSSQCVNLTTRTQLPPAYTNSFTRGVYYPDKVFRSSVLHSTQDLFLPFFSNVTWF
HAIHVSGTNGTKRFDNPVLPFNDGVYFASTEKSNIIRGWIFGTTLDSKTQSLLIVNNATNVVIKV
CEFQFCNDPFLGVYYHKNNKSWMESEFRVYSSANNCTFEYVSQPFLMDLEGKQGNFKNLREFVFK
NIDGYFKIYSKHTPINLVRDLPQGFSALEPLVDLPIGINITRFQTLLALHRSYLTPGDSSSGWTA
GAAAYYVGYLQPRTFLLKYNENGTITDAVDCALDPLSETKCTLKSFTVEKGIYQTSNFRVQPTES
IVRFPNITNLCPFGEVFNATRFASVYAWNRKRISNCVADYSVLYNSASFSTFKCYGVSPTKLNDL
CFTNVYADSFVIRGDEVRQIAPGQTGKIADYNYKLPDDFTGCVIAWNSNNLDSKVGGNYNYLYRL
FRKSNLKPFERDISTEIYQAGSTPCNGVEGFNCYFPLQSYGFQPTNGVGYQPYRVVVLSFELLHA
PATVCGPKKSTPLVKNKCVNFNFNGLTGTGVLTESNKKFLPFQQFGRDIADITDAVRDPQTLEIL
DITPCSFGGVSVITPGTNTSNQVAVLYQNVNCTEVPVAIHADQLTPTWRVYSTGSNVFQTRAGCL
IGAEHVNNSYECDIPIGAGICASYQTQTNSPSRAGSVASQSIIAYTMSLGAENSVAYSNNSIAIP
TNFTISVTTEILPVSMTKTSVDCTMYICGDSTECSNLLLQYGSFCTQLNRALTGIAVEQDKNTQE
VFAQVKQIYKTPPIKDFGGFNFSQILPDPSKPSKRSFIEDLLFNKVTLADAGFIKQYGDCLGDIA
ARDLICAQKFNGLTVLPPLLTDEMIAQYTSALLAGTITCGWTFGAGPCLQIPFAMQMAYRFNGIG
VTQNVLYENQKLIANQFNSAIGKIQDSLSSTPSALGKLQDVVNQNAQALNTLVKQLSSNFGAISS
VLNDILSRLDPPEAEVQIDRLITGRLQSLQTYVTQQLIRAAEIRASANLAATKMSECVLGQSKRV
DFCGKGYHLMSFPQSAPHGVVFLHVTYVPAQEKNFTTAPAICHDGKAHFPREGVFVSNGTHWFVT
QRNFYEPQIITTDNTFVSGNCDVVIGIVNNTVYDPLQPELDSFKEELDKYFKNHTSPDVDLGDIS
GINASVVNIQKEIDRLNEVAKNLNESLIDLQELGKYEQGSGYIPEAPRDGQAYVRKDGEWVLLST
FLGRSLEVLFQGPGSLPETGGGSDYKDDDDKGGGGSGGGGSGGGGSGGGGSGGGGSHHHHHH
SEQ ID NO 195: full length S protein with double proline
in the hinge loop
MFVFLVLLPLVSSQCVNLTTRTQLPPAYTNSFTRGVYYPDKVFRSSVLHSTQDLFLPFFSNVTWF
HAIHVSGTNGTKRFDNPVLPFNDGVYFASTEKSNIIRGWIFGTTLDSKTQSLLIVNNATNVVIKV
CEFQFCNDPFLGVYYHKNNKSWMESEFRVYSSANNCTFEYVSQPFLMDLEGKQGNFKNLREFVFK
NIDGYFKIYSKHTPINLVRDLPQGFSALEPLVDLPIGINITRFQTLLALHRSYLTPGDSSSGWTA
GAAAYYVGYLQPRTFLLKYNENGTITDAVDCALDPLSETKCTLKSFTVEKGIYQTSNFRVQPTES
IVRFPNITNLCPFGEVFNATRFASVYAWNRKRISNCVADYSVLYNSASFSTFKCYGVSPTKLNDL
CFTNVYADSFVIRGDEVRQIAPGQTGKIADYNYKLPDDFTGCVIAWNSNNLDSKVGGNYNYLYRL
FRKSNLKPFERDISTEIYQAGSTPCNGVEGFNCYFPLQSYGFQPTNGVGYQPYRVVVLSFELLHA
PATVCGPKKSTNLVKNKCVNFNFNGLTGTGVLTESNKKFLPFQQFGRDIADTTDAVRDPQTLEIL
DITPCSFGGVSVITPGTNTSNQVAVLYQDVNCTEVPVAIHADQLTPTWRVYSTGSNVFQTRAGCL
IGAEHVNNSYECDIPIGAGICASYQTQTNSPRRARSVASQSIIAYTMSLGAENSVAYSNNSIAIP
TNFTISVTTEILPVSMTKTSVDCTMYICGDSTECSNLLLQYGSFCTQLNRALTGIAVEQDKNTQE
VFAQVKQIYKTPPIKDFGGFNFSQILPDPSKPSKRSFIEDLLFNKVTLADAGFIKQYGDCLGDIA
ARDLICAQKFNGLTVLPPLLTDEMIAQYTSALLAGTITSGWTFGAGAALQIPFAMQMAYRFNGIG
VTQNVLYENQKLIANQFNSAIGKIQDSLSSTASALGKLQDVVNQNAQALNTLVKQLSSNFGAISS
VLNDILSRLDPPEAEVQIDRLITGRLQSLQTYVTQQLIRAAEIRASANLAATKMSECVLGQSKRV
DFCGKGYHLMSFPQSAPHGVVFLHVTYVPAQEKNFTTAPAICHDGKAHFPREGVFVSNGTHWFVT
QRNFYEPQIITTDNTFVSGNCDVVIGIVNNTVYDPLQPELDSFKEELDKYFKNHTSPDVDLGDIS
GINASVVNIQKEIDRLNEVAKNLNESLIDLQELGKYEQYIKWPWYIWLGFIAGLIAIVMVTIMLC
CMTSCCSCLKGCCSCGSCCKFDEDDSEPVLKGVKLHYT
SEQ ID NO 196: full length S protein with furin KO
MFVFLVLLPLVSSQCVNLTTRTQLPPAYTNSFTRGVYYPDKVFRSSVLHSTQDLFLPFFSNVTWF
HAIHVSGTNGTKRFDNPVLPFNDGVYFASTEKSNIIRGWIFGTTLDSKTQSLLIVNNATNVVIKV
CEFQFCNDPFLGVYYHKNNKSWMESEFRVYSSANNCTFEYVSQPFLMDLEGKQGNFKNLREFVFK
NIDGYFKIYSKHTPINLVRDLPQGFSALEPLVDLPIGINITRFQTLLALHRSYLTPGDSSSGWTA
GAAAYYVGYLQPRTFLLKYNENGTITDAVDCALDPLSETKCTLKSFTVEKGIYQTSNFRVQPTES
IVRFPNITNLCPFGEVFNATRFASVYAWNRKRISNCVADYSVLYNSASFSTFKCYGVSPTKLNDL
CFTNVYADSFVIRGDEVRQIAPGQTGKIADYNYKLPDDFTGCVIAWNSNNLDSKVGGNYNYLYRL
FRKSNLKPFERDISTEIYQAGSTPCNGVEGFNCYFPLQSYGFQPTNGVGYQPYRVVVLSFELLHA
PATVCGPKKSTNLVKNKCVNFNFNGLTGTGVLTESNKKFLPFQQFGRDIADTTDAVRDPQTLEIL
DITPCSFGGVSVITPGTNTSNQVAVLYQDVNCTEVPVAIHADQLTPTWRVYSTGSNVFQTRAGCL
IGAEHVNNSYECDIPIGAGICASYQTQTNSPSRAGSVASQSIIAYTMSLGAENSVAYSNNSIAIP
TNFTISVTTEILPVSMTKTSVDCTMYICGDSTECSNLLLQYGSFCTQLNRALTGIAVEQDKNTQE
VFAQVKQIYKTPPIKDFGGFNFSQILPDPSKPSKRSFIEDLLFNKVTLADAGFIKQYGDCLGDIA
ARDLICAQKFNGLTVLPPLLTDEMIAQYTSALLAGTITSGWTFGAGAALQIPFAMQMAYRFNGIG
VTQNVLYENQKLIANQFNSAIGKIQDSLSSTASALGKLQDVVNQNAQALNTLVKQLSSNFGAISS
VLNDILSRLDKVEAEVQIDRLITGRLQSLQTYVTQQLIRAAEIRASANLAATKMSECVLGQSKRV
DFCGKGYHLMSFPQSAPHGVVFLHVTYVPAQEKNFTTAPAICHDGKAHFPREGVFVSNGTHWFVT
QRNFYEPQIITTDNTFVSGNCDVVIGIVNNTVYDPLQPELDSFKEELDKYFKNHTSPDVDLGDIS
GINASVVNIQKEIDRLNEVAKNLNESLIDLQELGKYEQYIKWPWYIWLGFIAGLIAIVMVTIMLC
CMTSCCSCLKGCCSCGSCCKFDEDDSEPVLKGVKLHYT
SEQ ID NO 197: SEQ ID NO 196 + D614N + A892P + A942P
MFVFLVLLPLVSSQCVNLTTRTQLPPAYTNSFTRGVYYPDKVFRSSVLHSTQDLFLPFFSNVTWF
HAIHVSGTNGTKRFDNPVLPFNDGVYFASTEKSNIIRGWIFGTTLDSKTQSLLIVNNATNVVIKV
CEFQFCNDPFLGVYYHKNNKSWMESEFRVYSSANNCTFEYVSQPFLMDLEGKQGNFKNLREFVFK
NIDGYFKIYSKHTPINLVRDLPQGFSALEPLVDLPIGINITRFQTLLALHRSYLTPGDSSSGWTA
GAAAYYVGYLQPRTFLLKYNENGTITDAVDCALDPLSETKCTLKSFTVEKGIYQTSNFRVQPTES
IVRFPNITNLCPFGEVFNATRFASVYAWNRKRISNCVADYSVLYNSASFSTFKCYGVSPTKLNDL
CFTNVYADSFVIRGDEVRQIAPGQTGKIADYNYKLPDDFTGCVIAWNSNNLDSKVGGNYNYLYRL
FRKSNLKPFERDISTEIYQAGSTPCNGVEGFNCYFPLQSYGFQPTNGVGYQPYRVVVLSFELLHA
PATVCGPKKSTNLVKNKCVNFNFNGLTGTGVLTESNKKFLPFQQFGRDIADTTDAVRDPQTLEIL
DITPCSFGGVSVITPGTNTSNQVAVLYQNVNCTEVPVAIHADQLTPTWRVYSTGSNVFQTRAGCL
IGAEHVNNSYECDIPIGAGICASYQTQTNSPSRAGSVASQSIIAYTMSLGAENSVAYSNNSIAIP
TNFTISVTTEILPVSMTKTSVDCTMYICGDSTECSNLLLQYGSFCTQLNRALTGIAVEQDKNTQE
VFAQVKQIYKTPPIKDFGGFNFSQILPDPSKPSKRSFIEDLLFNKVTLADAGFIKQYGDCLGDIA
ARDLICAQKFNGLTVLPPLLTDEMIAQYTSALLAGTITSGWTFGAGPALQIPFAMQMAYRFNGIG
VTQNVLYENQKLIANQFNSAIGKIQDSLSSTPSALGKLQDVVNQNAQALNTLVKQLSSNFGAISS
VLNDILSRLDKVEAEVQIDRLITGRLQSLQTYVTQQLIRAAEIRASANLAATKMSECVLGQSKRV
DFCGKGYHLMSFPQSAPHGVVFLHVTYVPAQEKNFTTAPAICHDGKAHFPREGVFVSNGTHWFVT
QRNFYEPQIITTDNTFVSGNCDVVIGIVNNTVYDPLQPELDSFKEELDKYFKNHTSPDVDLGDIS
GINASVVNIQKEIDRLNEVAKNLNESLIDLQELGKYEQYIKWPWYIWLGFIAGLIAIVMVTIMLC
CMTSCCSCLKGCCSCGSCCKFDEDDSEPVLKGVKLHYT
SEQ ID NO 198: SEQ ID NO 196 + D614N + A892P + A942P + T941P
MFVFLVLLPLVSSQCVNLTTRTQLPPAYTNSFTRGVYYPDKVFRSSVLHSTQDLFLPFFSNVTWF
HAIHVSGTNGTKRFDNPVLPFNDGVYFASTEKSNIIRGWIFGTTLDSKTQSLLIVNNATNVVIKV
CEFQFCNDPFLGVYYHKNNKSWMESEFRVYSSANNCTFEYVSQPFLMDLEGKQGNFKNLREFVFK
NIDGYFKIYSKHTPINLVRDLPQGFSALEPLVDLPIGINITRFQTLLALHRSYLTPGDSSSGWTA
GAAAYYVGYLQPRTFLLKYNENGTITDAVDCALDPLSETKCTLKSFTVEKGIYQTSNFRVQPTES
IVRFPNITNLCPFGEVFNATRFASVYAWNRKRISNCVADYSVLYNSASFSTFKCYGVSPTKLNDL
CFTNVYADSFVIRGDEVRQIAPGQTGKIADYNYKLPDDFTGCVIAWNSNNLDSKVGGNYNYLYRL
FRKSNLKPFERDISTEIYQAGSTPCNGVEGFNCYFPLQSYGFQPTNGVGYQPYRVVVLSFELLHA
PATVCGPKKSTNLVKNKCVNFNFNGLTGTGVLTESNKKFLPFQQFGRDIADTTDAVRDPQTLEIL
DITPCSFGGVSVITPGTNTSNQVAVLYQNVNCTEVPVAIHADQLTPTWRVYSTGSNVFQTRAGCL
IGAEHVNNSYECDIPIGAGICASYQTQTNSPSRAGSVASQSIIAYTMSLGAENSVAYSNNSIAIP
TNFTISVTTEILPVSMTKTSVDCTMYICGDSTECSNLLLQYGSFCTQLNRALTGIAVEQDKNTQE
VFAQVKQIYKTPPIKDFGGFNFSQILPDPSKPSKRSFIEDLLFNKVTLADAGFIKQYGDCLGDIA
ARDLICAQKFNGLTVLPPLLTDEMIAQYTSALLAGTITSGWTFGAGPALQIPFAMQMAYRFNGIG
VTQNVLYENQKLIANQFNSAIGKIQDSLSSPPSALGKLQDVVNQNAQALNTLVKQLSSNFGAISS
VLNDILSRLDKVEAEVQIDRLITGRLQSLQTYVTQQLIRAAEIRASANLAATKMSECVLGQSKRV
DFCGKGYHLMSFPQSAPHGVVFLHVTYVPAQEKNFTTAPAICHDGKAHFPREGVFVSNGTHWFVT
QRNFYEPQIITTDNTFVSGNCDVVIGIVNNTVYDPLQPELDSFKEELDKYFKNHTSPDVDLGDIS
GINASVVNIQKEIDRLNEVAKNLNESLIDLQELGKYEQYIKWPWYIWLGFIAGLIAIVMVTIMLC
CMTSCCSCLKGCCSCGSCCKFDEDDSEPVLKGVKLHYT
SEQ ID NO 199: SEQ ID NO 196 + D614N + A892P + A942P + A944P
MFVFLVLLPLVSSQCVNLTTRTQLPPAYTNSFTRGVYYPDKVFRSSVLHSTQDLFLPFFSNVTWF
HAIHVSGTNGTKRFDNPVLPFNDGVYFASTEKSNIIRGWIFGTTLDSKTQSLLIVNNATNVVIKV
CEFQFCNDPFLGVYYHKNNKSWMESEFRVYSSANNCTFEYVSQPFLMDLEGKQGNFKNLREFVFK
NIDGYFKIYSKHTPINLVRDLPQGFSALEPLVDLPIGINITRFQTLLALHRSYLTPGDSSSGWTA
GAAAYYVGYLQPRTFLLKYNENGTITDAVDCALDPLSETKCTLKSFTVEKGIYQTSNFRVQPTES
IVRFPNITNLCPFGEVFNATRFASVYAWNRKRISNCVADYSVLYNSASFSTFKCYGVSPTKLNDL
CFTNVYADSFVIRGDEVRQIAPGQTGKIADYNYKLPDDFTGCVIAWNSNNLDSKVGGNYNYLYRL
FRKSNLKPFERDISTEIYQAGSTPCNGVEGFNCYFPLQSYGFQPTNGVGYQPYRVVVLSFELLHA
PATVCGPKKSTNLVKNKCVNFNFNGLTGTGVLTESNKKFLPFQQFGRDIADTTDAVRDPQTLEIL
DITPCSFGGVSVITPGTNTSNQVAVLYQNVNCTEVPVAIHADQLTPTWRVYSTGSNVFQTRAGCL
IGAEHVNNSYECDIPIGAGICASYQTQTNSPSRAGSVASQSIIAYTMSLGAENSVAYSNNSIAIP
TNFTISVTTEILPVSMTKTSVDCTMYICGDSTECSNLLLQYGSFCTQLNRALTGIAVEQDKNTQE
VFAQVKQIYKTPPIKDFGGFNFSQILPDPSKPSKRSFIEDLLFNKVTLADAGFIKQYGDCLGDIA
ARDLICAQKFNGLTVLPPLLTDEMIAQYTSALLAGTITSGWTFGAGPALQIPFAMQMAYRFNGIG
VTQNVLYENQKLIANQFNSAIGKIQDSLSSTPSPLGKLQDVVNQNAQALNTLVKQLSSNFGAISS
VLNDILSRLDKVEAEVQIDRLITGRLQSLQTYVTQQLIRAAEIRASANLAATKMSECVLGQSKRV
DFCGKGYHLMSFPQSAPHGVVFLHVTYVPAQEKNFTTAPAICHDGKAHFPREGVFVSNGTHWFVT
QRNFYEPQIITTDNTFVSGNCDVVIGIVNNTVYDPLQPELDSFKEELDKYFKNHTSPDVDLGDIS
GINASVVNIQKEIDRLNEVAKNLNESLIDLQELGKYEQYIKWPWYIWLGFIAGLIAIVMVTIMLC
CMTSCCSCLKGCCSCGSCCKFDEDDSEPVLKGVKLHYT
SEQ ID NO 200: SEQ ID NO 196 + D614N + A892P + T941P
MFVFLVLLPLVSSQCVNLTTRTQLPPAYTNSFTRGVYYPDKVFRSSVLHSTQDLFLPFFSNVTWF
HAIHVSGTNGTKRFDNPVLPFNDGVYFASTEKSNIIRGWIFGTTLDSKTQSLLIVNNATNVVIKV
CEFQFCNDPFLGVYYHKNNKSWMESEFRVYSSANNCTFEYVSQPFLMDLEGKQGNFKNLREFVFK
NIDGYFKIYSKHTPINLVRDLPQGFSALEPLVDLPIGINITRFQTLLALHRSYLTPGDSSSGWTA
GAAAYYVGYLQPRTFLLKYNENGTITDAVDCALDPLSETKCTLKSFTVEKGIYQTSNFRVQPTES
IVRFPNITNLCPFGEVFNATRFASVYAWNRKRISNCVADYSVLYNSASFSTFKCYGVSPTKLNDL
CFTNVYADSFVIRGDEVRQIAPGQTGKIADYNYKLPDDFTGCVIAWNSNNLDSKVGGNYNYLYRL
FRKSNLKPFERDISTEIYQAGSTPCNGVEGFNCYFPLQSYGFQPTNGVGYQPYRVVVLSFELLHA
PATVCGPKKSTNLVKNKCVNFNFNGLTGTGVLTESNKKFLPFQQFGRDIADTTDAVRDPQTLEIL
DITPCSFGGVSVITPGTNTSNQVAVLYQNVNCTEVPVAIHADQLTPTWRVYSTGSNVFQTRAGCL
IGAEHVNNSYECDIPIGAGICASYQTQTNSPSRAGSVASQSIIAYTMSLGAENSVAYSNNSIAIP
TNFTISVTTEILPVSMTKTSVDCTMYICGDSTECSNLLLQYGSFCTQLNRALTGIAVEQDKNTQE
VFAQVKQIYKTPPIKDFGGFNFSQILPDPSKPSKRSFIEDLLFNKVTLADAGFIKQYGDCLGDIA
ARDLICAQKFNGLTVLPPLLTDEMIAQYTSALLAGTITSGWTFGAGPALQIPFAMQMAYRFNGIG
VTQNVLYENQKLIANQFNSAIGKIQDSLSSPASALGKLQDVVNQNAQALNTLVKQLSSNFGAISS
VLNDILSRLDKVEAEVQIDRLITGRLQSLQTYVTQQLIRAAEIRASANLAATKMSECVLGQSKRV
DFCGKGYHLMSFPQSAPHGVVFLHVTYVPAQEKNFTTAPAICHDGKAHFPREGVFVSNGTHWFVT
QRNFYEPQIITTDNTFVSGNCDVVIGIVNNTVYDPLQPELDSFKEELDKYFKNHTSPDVDLGDIS
GINASVVNIQKEIDRLNEVAKNLNESLIDLQELGKYEQYIKWPWYIWLGFIAGLIAIVMVTIMLC
CMTSCCSCLKGCCSCGSCCKFDEDDSEPVLKGVKLHYT
SEQ ID NO 201: SEQ ID NO 196 + D614N + A892P + A944P
MFVFLVLLPLVSSQCVNLTTRTQLPPAYTNSFTRGVYYPDKVFRSSVLHSTQDLFLPFFSNVTWF
HAIHVSGTNGTKRFDNPVLPFNDGVYFASTEKSNIIRGWIFGTTLDSKTQSLLIVNNATNVVIKV
CEFQFCNDPFLGVYYHKNNKSWMESEFRVYSSANNCTFEYVSQPFLMDLEGKQGNFKNLREFVFK
NIDGYFKIYSKHTPINLVRDLPQGFSALEPLVDLPIGINITRFQTLLALHRSYLTPGDSSSGWTA
GAAAYYVGYLQPRTFLLKYNENGTITDAVDCALDPLSETKCTLKSFTVEKGIYQTSNFRVQPTES
IVRFPNITNLCPFGEVFNATRFASVYAWNRKRISNCVADYSVLYNSASFSTFKCYGVSPTKLNDL
CFTNVYADSFVIRGDEVRQIAPGQTGKIADYNYKLPDDFTGCVIAWNSNNLDSKVGGNYNYLYRL
FRKSNLKPFERDISTEIYQAGSTPCNGVEGFNCYFPLQSYGFQPTNGVGYQPYRVVVLSFELLHA
PATVCGPKKSTNLVKNKCVNFNFNGLTGTGVLTESNKKFLPFQQFGRDIADTTDAVRDPQTLEIL
DITPCSFGGVSVITPGTNTSNQVAVLYQNVNCTEVPVAIHADQLTPTWRVYSTGSNVFQTRAGCL
IGAEHVNNSYECDIPIGAGICASYQTQTNSPSRAGSVASQSIIAYTMSLGAENSVAYSNNSIAIP
TNFTISVTTEILPVSMTKTSVDCTMYICGDSTECSNLLLQYGSFCTQLNRALTGIAVEQDKNTQE
VFAQVKQIYKTPPIKDFGGFNFSQILPDPSKPSKRSFIEDLLFNKVTLADAGFIKQYGDCLGDIA
ARDLICAQKFNGLTVLPPLLTDEMIAQYTSALLAGTITSGWTFGAGPALQIPFAMQMAYRFNGIG
VTQNVLYENQKLIANQFNSAIGKIQDSLSSTASPLGKLQDVVNQNAQALNTLVKQLSSNFGAISS
VLNDILSRLDKVEAEVQIDRLITGRLQSLQTYVTQQLIRAAEIRASANLAATKMSECVLGQSKRV
DFCGKGYHLMSFPQSAPHGVVFLHVTYVPAQEKNFTTAPAICHDGKAHFPREGVFVSNGTHWFVT
QRNFYEPQIITTDNTFVSGNCDVVIGIVNNTVYDPLQPELDSFKEELDKYFKNHTSPDVDLGDIS
GINASVVNIQKEIDRLNEVAKNLNESLIDLQELGKYEQYIKWPWYIWLGFIAGLIAIVMVTIMLC
CMTSCCSCLKGCCSCGSCCKFDEDDSEPVLKGVKLHYT
SEQ ID NO 202: SEQ ID NO 196 + D614N + A892P + A942P + V987P
MFVFLVLLPLVSSQCVNLTTRTQLPPAYTNSFTRGVYYPDKVFRSSVLHSTQDLFLPFFSNVTWF
HAIHVSGTNGTKRFDNPVLPFNDGVYFASTEKSNIIRGWIFGTTLDSKTQSLLIVNNATNVVIKV
CEFQFCNDPFLGVYYHKNNKSWMESEFRVYSSANNCTFEYVSQPFLMDLEGKQGNFKNLREFVFK
NIDGYFKIYSKHTPINLVRDLPQGFSALEPLVDLPIGINITRFQTLLALHRSYLTPGDSSSGWTA
GAAAYYVGYLQPRTFLLKYNENGTITDAVDCALDPLSETKCTLKSFTVEKGIYQTSNFRVQPTES
IVRFPNITNLCPFGEVFNATRFASVYAWNRKRISNCVADYSVLYNSASFSTFKCYGVSPTKLNDL
CFTNVYADSFVIRGDEVRQIAPGQTGKIADYNYKLPDDFTGCVIAWNSNNLDSKVGGNYNYLYRL
FRKSNLKPFERDISTEIYQAGSTPCNGVEGFNCYFPLQSYGFQPTNGVGYQPYRVVVLSFELLHA
PATVCGPKKSTNLVKNKCVNFNFNGLTGTGVLTESNKKFLPFQQFGRDIADTTDAVRDPQTLEIL
DITPCSFGGVSVITPGTNTSNQVAVLYQNVNCTEVPVAIHADQLTPTWRVYSTGSNVFQTRAGCL
IGAEHVNNSYECDIPIGAGICASYQTQTNSPSRAGSVASQSIIAYTMSLGAENSVAYSNNSIAIP
TNFTISVTTEILPVSMTKTSVDCTMYICGDSTECSNLLLQYGSFCTQLNRALTGIAVEQDKNTQE
VFAQVKQIYKTPPIKDFGGFNFSQILPDPSKPSKRSFIEDLLFNKVTLADAGFIKQYGDCLGDIA
ARDLICAQKFNGLTVLPPLLTDEMIAQYTSALLAGTITSGWTFGAGPALQIPFAMQMAYRFNGIG
VTQNVLYENQKLIANQFNSAIGKIQDSLSSTPSALGKLQDVVNQNAQALNTLVKQLSSNFGAISS
VLNDILSRLDKPEAEVQIDRLITGRLQSLQTYVTQQLIRAAEIRASANLAATKMSECVLGQSKRV
DFCGKGYHLMSFPQSAPHGVVFLHVTYVPAQEKNFTTAPAICHDGKAHFPREGVFVSNGTHWFVT
QRNFYEPQIITTDNTFVSGNCDVVIGIVNNTVYDPLQPELDSFKEELDKYFKNHTSPDVDLGDIS
GINASVVNIQKEIDRLNEVAKNLNESLIDLQELGKYEQYIKWPWYIWLGFIAGLIAIVMVTIMLC
CMTSCCSCLKGCCSCGSCCKFDEDDSEPVLKGVKLHYT
SEQ ID NO 203: SEQ ID NO 196 + D614N + A892P + A942P + T941P + V987P
MFVFLVLLPLVSSQCVNLTTRTQLPPAYTNSFTRGVYYPDKVFRSSVLHSTQDLFLPFFSNVTWF
HAIHVSGTNGTKRFDNPVLPFNDGVYFASTEKSNIIRGWIFGTTLDSKTQSLLIVNNATNVVIKV
CEFQFCNDPFLGVYYHKNNKSWMESEFRVYSSANNCTFEYVSQPFLMDLEGKQGNFKNLREFVFK
NIDGYFKIYSKHTPINLVRDLPQGFSALEPLVDLPIGINITRFQTLLALHRSYLTPGDSSSGWTA
GAAAYYVGYLQPRTFLLKYNENGTITDAVDCALDPLSETKCTLKSFTVEKGIYQTSNFRVQPTES
IVRFPNITNLCPFGEVFNATRFASVYAWNRKRISNCVADYSVLYNSASFSTFKCYGVSPTKLNDL
CFTNVYADSFVIRGDEVRQIAPGQTGKIADYNYKLPDDFTGCVIAWNSNNLDSKVGGNYNYLYRL
FRKSNLKPFERDISTEIYQAGSTPCNGVEGFNCYFPLQSYGFQPTNGVGYQPYRVVVLSFELLHA
PATVCGPKKSTNLVKNKCVNFNFNGLTGTGVLTESNKKFLPFQQFGRDIADTTDAVRDPQTLEIL
DITPCSFGGVSVITPGTNTSNQVAVLYQNVNCTEVPVAIHADQLTPTWRVYSTGSNVFQTRAGCL
IGAEHVNNSYECDIPIGAGICASYQTQTNSPSRAGSVASQSIIAYTMSLGAENSVAYSNNSIAIP
TNFTISVTTEILPVSMTKTSVDCTMYICGDSTECSNLLLQYGSFCTQLNRALTGIAVEQDKNTQE
VFAQVKQIYKTPPIKDFGGFNFSQILPDPSKPSKRSFIEDLLFNKVTLADAGFIKQYGDCLGDIA
ARDLICAQKFNGLTVLPPLLTDEMIAQYTSALLAGTITSGWTFGAGPALQIPFAMQMAYRFNGIG
VTQNVLYENQKLIANQFNSAIGKIQDSLSSPPSALGKLQDVVNQNAQALNTLVKQLSSNFGAISS
VLNDILSRLDKPEAEVQIDRLITGRLQSLQTYVTQQLIRAAEIRASANLAATKMSECVLGQSKRV
DFCGKGYHLMSFPQSAPHGVVFLHVTYVPAQEKNFTTAPAICHDGKAHFPREGVFVSNGTHWFVT
QRNFYEPQIITTDNTFVSGNCDVVIGIVNNTVYDPLQPELDSFKEELDKYFKNHTSPDVDLGDIS
GINASVVNIQKEIDRLNEVAKNLNESLIDLQELGKYEQYIKWPWYIWLGFIAGLIAIVMVTIMLC
CMTSCCSCLKGCCSCGSCCKFDEDDSEPVLKGVKLHYT
SEQ ID NO 204: SEQ ID NO 196 + D614N + A892P + A942P + A944P + V987P
MFVFLVLLPLVSSQCVNLTTRTQLPPAYTNSFTRGVYYPDKVFRSSVLHSTQDLFLPFFSNVTWF
HAIHVSGTNGTKRFDNPVLPFNDGVYFASTEKSNIIRGWIFGTTLDSKTQSLLIVNNATNVVIKV
CEFQFCNDPFLGVYYHKNNKSWMESEFRVYSSANNCTFEYVSQPFLMDLEGKQGNFKNLREFVFK
NIDGYFKIYSKHTPINLVRDLPQGFSALEPLVDLPIGINITRFQTLLALHRSYLTPGDSSSGWTA
GAAAYYVGYLQPRTFLLKYNENGTITDAVDCALDPLSETKCTLKSFTVEKGIYQTSNFRVQPTES
IVRFPNITNLCPFGEVFNATRFASVYAWNRKRISNCVADYSVLYNSASFSTFKCYGVSPTKLNDL
CFTNVYADSFVIRGDEVRQIAPGQTGKIADYNYKLPDDFTGCVIAWNSNNLDSKVGGNYNYLYRL
FRKSNLKPFERDISTEIYQAGSTPCNGVEGFNCYFPLQSYGFQPTNGVGYQPYRVVVLSFELLHA
PATVCGPKKSTNLVKNKCVNFNFNGLTGTGVLTESNKKFLPFQQFGRDIADTTDAVRDPQTLEIL
DITPCSFGGVSVITPGTNTSNQVAVLYQNVNCTEVPVAIHADQLTPTWRVYSTGSNVFQTRAGCL
IGAEHVNNSYECDIPIGAGICASYQTQTNSPSRAGSVASQSIIAYTMSLGAENSVAYSNNSIAIP
TNFTISVTTEILPVSMTKTSVDCTMYICGDSTECSNLLLQYGSFCTQLNRALTGIAVEQDKNTQE
VFAQVKQIYKTPPIKDFGGFNFSQILPDPSKPSKRSFIEDLLFNKVTLADAGFIKQYGDCLGDIA
ARDLICAQKFNGLTVLPPLLTDEMIAQYTSALLAGTITSGWTFGAGPALQIPFAMQMAYRFNGIG
VTQNVLYENQKLIANQFNSAIGKIQDSLSSTPSPLGKLQDVVNQNAQALNTLVKQLSSNFGAISS
VLNDILSRLDKPEAEVQIDRLITGRLQSLQTYVTQQLIRAAEIRASANLAATKMSECVLGQSKRV
DFCGKGYHLMSFPQSAPHGVVFLHVTYVPAQEKNFTTAPAICHDGKAHFPREGVFVSNGTHWFVT
QRNFYEPQIITTDNTFVSGNCDVVIGIVNNTVYDPLQPELDSFKEELDKYFKNHTSPDVDLGDIS
GINASVVNIQKEIDRLNEVAKNLNESLIDLQELGKYEQYIKWPWYIWLGFIAGLIAIVMVTIMLC
CMTSCCSCLKGCCSCGSCCKFDEDDSEPVLKGVKLHYT
SEQ ID NO 205: SEQ ID NO 196 + D614N + A892P + T941P + V987P
MFVFLVLLPLVSSQCVNLTTRTQLPPAYTNSFTRGVYYPDKVFRSSVLHSTQDLFLPFFSNVTWF
HAIHVSGTNGTKRFDNPVLPFNDGVYFASTEKSNIIRGWIFGTTLDSKTQSLLIVNNATNVVIKV
CEFQFCNDPFLGVYYHKNNKSWMESEFRVYSSANNCTFEYVSQPFLMDLEGKQGNFKNLREFVFK
NIDGYFKIYSKHTPINLVRDLPQGFSALEPLVDLPIGINITRFQTLLALHRSYLTPGDSSSGWTA
GAAAYYVGYLQPRTFLLKYNENGTITDAVDCALDPLSETKCTLKSFTVEKGIYQTSNFRVQPTES
IVRFPNITNLCPFGEVFNATRFASVYAWNRKRISNCVADYSVLYNSASFSTFKCYGVSPTKLNDL
CFTNVYADSFVIRGDEVRQIAPGQTGKIADYNYKLPDDFTGCVIAWNSNNLDSKVGGNYNYLYRL
FRKSNLKPFERDISTEIYQAGSTPCNGVEGFNCYFPLQSYGFQPTNGVGYQPYRVVVLSFELLHA
PATVCGPKKSTNLVKNKCVNFNFNGLTGTGVLTESNKKFLPFQQFGRDIADTTDAVRDPQTLEIL
DITPCSFGGVSVITPGTNTSNQVAVLYQNVNCTEVPVAIHADQLTPTWRVYSTGSNVFQTRAGCL
IGAEHVNNSYECDIPIGAGICASYQTQTNSPSRAGSVASQSIIAYTMSLGAENSVAYSNNSIAIP
TNFTISVTTEILPVSMTKTSVDCTMYICGDSTECSNLLLQYGSFCTQLNRALTGIAVEQDKNTQE
VFAQVKQIYKTPPIKDFGGFNFSQILPDPSKPSKRSFIEDLLFNKVTLADAGFIKQYGDCLGDIA
ARDLICAQKFNGLTVLPPLLTDEMIAQYTSALLAGTITSGWTFGAGPALQIPFAMQMAYRFNGIG
VTQNVLYENQKLIANQFNSAIGKIQDSLSSPASALGKLQDVVNQNAQALNTLVKQLSSNFGAISS
VLNDILSRLDKPEAEVQIDRLITGRLQSLQTYVTQQLIRAAEIRASANLAATKMSECVLGQSKRV
DFCGKGYHLMSFPQSAPHGVVFLHVTYVPAQEKNFTTAPAICHDGKAHFPREGVFVSNGTHWFVT
QRNFYEPQIITTDNTFVSGNCDVVIGIVNNTVYDPLQPELDSFKEELDKYFKNHTSPDVDLGDIS
GINASVVNIQKEIDRLNEVAKNLNESLIDLQELGKYEQYIKWPWYIWLGFIAGLIAIVMVTIMLC
CMTSCCSCLKGCCSCGSCCKFDEDDSEPVLKGVKLHYT
SEQ ID NO 206: SEQ ID NO 196 + D614N + A892P + A944P + V987P
MFVFLVLLPLVSSQCVNLTTRTQLPPAYTNSFTRGVYYPDKVFRSSVLHSTQDLFLPFFSNVTWF
HAIHVSGTNGTKRFDNPVLPFNDGVYFASTEKSNIIRGWIFGTTLDSKTQSLLIVNNATNVVIKV
CEFQFCNDPFLGVYYHKNNKSWMESEFRVYSSANNCTFEYVSQPFLMDLEGKQGNFKNLREFVFK
NIDGYFKIYSKHTPINLVRDLPQGFSALEPLVDLPIGINITRFQTLLALHRSYLTPGDSSSGWTA
GAAAYYVGYLQPRTFLLKYNENGTITDAVDCALDPLSETKCTLKSFTVEKGIYQTSNFRVQPTES
IVRFPNITNLCPFGEVFNATRFASVYAWNRKRISNCVADYSVLYNSASFSTFKCYGVSPTKLNDL
CFTNVYADSFVIRGDEVRQIAPGQTGKIADYNYKLPDDFTGCVIAWNSNNLDSKVGGNYNYLYRL
FRKSNLKPFERDISTEIYQAGSTPCNGVEGFNCYFPLQSYGFQPTNGVGYQPYRVVVLSFELLHA
PATVCGPKKSTNLVKNKCVNFNFNGLTGTGVLTESNKKFLPFQQFGRDIADTTDAVRDPQTLEIL
DITPCSFGGVSVITPGTNTSNQVAVLYQNVNCTEVPVAIHADQLTPTWRVYSTGSNVFQTRAGCL
IGAEHVNNSYECDIPIGAGICASYQTQTNSPSRAGSVASQSIIAYTMSLGAENSVAYSNNSIAIP
TNFTISVTTEILPVSMTKTSVDCTMYICGDSTECSNLLLQYGSFCTQLNRALTGIAVEQDKNTQE
VFAQVKQIYKTPPIKDFGGFNFSQILPDPSKPSKRSFIEDLLFNKVTLADAGFIKQYGDCLGDIA
ARDLICAQKFNGLTVLPPLLTDEMIAQYTSALLAGTITSGWTFGAGPALQIPFAMQMAYRFNGIG
VTQNVLYENQKLIANQFNSAIGKIQDSLSSTASPLGKLQDVVNQNAQALNTLVKQLSSNFGAISS
VLNDILSRLDKPEAEVQIDRLITGRLQSLQTYVTQQLIRAAEIRASANLAATKMSECVLGQSKRV
DFCGKGYHLMSFPQSAPHGVVFLHVTYVPAQEKNFTTAPAICHDGKAHFPREGVFVSNGTHWFVT
QRNFYEPQIITTDNTFVSGNCDVVIGIVNNTVYDPLQPELDSFKEELDKYFKNHTSPDVDLGDIS
GINASVVNIQKEIDRLNEVAKNLNESLIDLQELGKYEQYIKWPWYIWLGFIAGLIAIVMVTIMLC
CMTSCCSCLKGCCSCGSCCKFDEDDSEPVLKGVKLHYT
SEQ ID NO 207: SEQ ID NO 196 + D614N + A892P + A942P + K986P + V987P
MFVFLVLLPLVSSQCVNLTTRTQLPPAYTNSFTRGVYYPDKVFRSSVLHSTQDLFLPFFSNVTWF
HAIHVSGTNGTKRFDNPVLPFNDGVYFASTEKSNIIRGWIFGTTLDSKTQSLLIVNNATNVVIKV
CEFQFCNDPFLGVYYHKNNKSWMESEFRVYSSANNCTFEYVSQPFLMDLEGKQGNFKNLREFVFK
NIDGYFKIYSKHTPINLVRDLPQGFSALEPLVDLPIGINITRFQTLLALHRSYLTPGDSSSGWTA
GAAAYYVGYLQPRTFLLKYNENGTITDAVDCALDPLSETKCTLKSFTVEKGIYQTSNFRVQPTES
IVRFPNITNLCPFGEVFNATRFASVYAWNRKRISNCVADYSVLYNSASFSTFKCYGVSPTKLNDL
CFTNVYADSFVIRGDEVRQIAPGQTGKIADYNYKLPDDFTGCVIAWNSNNLDSKVGGNYNYLYRL
FRKSNLKPFERDISTEIYQAGSTPCNGVEGFNCYFPLQSYGFQPTNGVGYQPYRVVVLSFELLHA
PATVCGPKKSTNLVKNKCVNFNFNGLTGTGVLTESNKKFLPFQQFGRDIADTTDAVRDPQTLEIL
DITPCSFGGVSVITPGTNTSNQVAVLYQNVNCTEVPVAIHADQLTPTWRVYSTGSNVFQTRAGCL
IGAEHVNNSYECDIPIGAGICASYQTQTNSPSRAGSVASQSIIAYTMSLGAENSVAYSNNSIAIP
TNFTISVTTEILPVSMTKTSVDCTMYICGDSTECSNLLLQYGSFCTQLNRALTGIAVEQDKNTQE
VFAQVKQIYKTPPIKDFGGFNFSQILPDPSKPSKRSFIEDLLFNKVTLADAGFIKQYGDCLGDIA
ARDLICAQKFNGLTVLPPLLTDEMIAQYTSALLAGTITSGWTFGAGPALQIPFAMQMAYRFNGIG
VTQNVLYENQKLIANQFNSAIGKIQDSLSSTPSALGKLQDVVNQNAQALNTLVKQLSSNFGAISS
VLNDILSRLDPPEAEVQIDRLITGRLQSLQTYVTQQLIRAAEIRASANLAATKMSECVLGQSKRV
DFCGKGYHLMSFPQSAPHGVVFLHVTYVPAQEKNFTTAPAICHDGKAHFPREGVFVSNGTHWFVT
QRNFYEPQIITTDNTFVSGNCDVVIGIVNNTVYDPLQPELDSFKEELDKYFKNHTSPDVDLGDIS
GINASVVNIQKEIDRLNEVAKNLNESLIDLQELGKYEQYIKWPWYIWLGFIAGLIAIVMVTIMLC
CMTSCCSCLKGCCSCGSCCKFDEDDSEPVLKGVKLHYT
SEQ ID NO 208: SEQ ID NO 196 + D614N + A892P + A942P + T941P + K986P + V987P
MFVFLVLLPLVSSQCVNLTTRTQLPPAYTNSFTRGVYYPDKVFRSSVLHSTQDLFLPFFSNVTWF
HAIHVSGTNGTKRFDNPVLPFNDGVYFASTEKSNIIRGWIFGTTLDSKTQSLLIVNNATNVVIKV
CEFQFCNDPFLGVYYHKNNKSWMESEFRVYSSANNCTFEYVSQPFLMDLEGKQGNFKNLREFVFK
NIDGYFKIYSKHTPINLVRDLPQGFSALEPLVDLPIGINITRFQTLLALHRSYLTPGDSSSGWTA
GAAAYYVGYLQPRTFLLKYNENGTITDAVDCALDPLSETKCTLKSFTVEKGIYQTSNFRVQPTES
IVRFPNITNLCPFGEVFNATRFASVYAWNRKRISNCVADYSVLYNSASFSTFKCYGVSPTKLNDL
CFTNVYADSFVIRGDEVRQIAPGQTGKIADYNYKLPDDFTGCVIAWNSNNLDSKVGGNYNYLYRL
FRKSNLKPFERDISTEIYQAGSTPCNGVEGFNCYFPLQSYGFQPTNGVGYQPYRVVVLSFELLHA
PATVCGPKKSTNLVKNKCVNFNFNGLTGTGVLTESNKKFLPFQQFGRDIADTTDAVRDPQTLEIL
DITPCSFGGVSVITPGTNTSNQVAVLYQNVNCTEVPVAIHADQLTPTWRVYSTGSNVFQTRAGCL
IGAEHVNNSYECDIPIGAGICASYQTQTNSPSRAGSVASQSIIAYTMSLGAENSVAYSNNSIAIP
TNFTISVTTEILPVSMTKTSVDCTMYICGDSTECSNLLLQYGSFCTQLNRALTGIAVEQDKNTQE
VFAQVKQIYKTPPIKDFGGFNFSQILPDPSKPSKRSFIEDLLFNKVTLADAGFIKQYGDCLGDIA
ARDLICAQKFNGLTVLPPLLTDEMIAQYTSALLAGTITSGWTFGAGPALQIPFAMQMAYRFNGIG
VTQNVLYENQKLIANQFNSAIGKIQDSLSSPPSALGKLQDVVNQNAQALNTLVKQLSSNFGAISS
VLNDILSRLDPPEAEVQIDRLITGRLQSLQTYVTQQLIRAAEIRASANLAATKMSECVLGQSKRV
DFCGKGYHLMSFPQSAPHGVVFLHVTYVPAQEKNFTTAPAICHDGKAHFPREGVFVSNGTHWFVT
QRNFYEPQIITTDNTFVSGNCDVVIGIVNNTVYDPLQPELDSFKEELDKYFKNHTSPDVDLGDIS
GINASVVNIQKEIDRLNEVAKNLNESLIDLQELGKYEQYIKWPWYIWLGFIAGLIAIVMVTIMLC
CMTSCCSCLKGCCSCGSCCKFDEDDSEPVLKGVKLHYT
SEQ ID NO 209: SEQ ID NO 196 + D614N + A892P + A942P + A944P + K986P + V987P
MFVFLVLLPLVSSQCVNLTTRTQLPPAYTNSFTRGVYYPDKVFRSSVLHSTQDLFLPFFSNVTWF
HAIHVSGTNGTKRFDNPVLPFNDGVYFASTEKSNIIRGWIFGTTLDSKTQSLLIVNNATNVVIKV
CEFQFCNDPFLGVYYHKNNKSWMESEFRVYSSANNCTFEYVSQPFLMDLEGKQGNFKNLREFVFK
NIDGYFKIYSKHTPINLVRDLPQGFSALEPLVDLPIGINITRFQTLLALHRSYLTPGDSSSGWTA
GAAAYYVGYLQPRTFLLKYNENGTITDAVDCALDPLSETKCTLKSFTVEKGIYQTSNFRVQPTES
IVRFPNITNLCPFGEVFNATRFASVYAWNRKRISNCVADYSVLYNSASFSTFKCYGVSPTKLNDL
CFTNVYADSFVIRGDEVRQIAPGQTGKIADYNYKLPDDFTGCVIAWNSNNLDSKVGGNYNYLYRL
FRKSNLKPFERDISTEIYQAGSTPCNGVEGFNCYFPLQSYGFQPTNGVGYQPYRVVVLSFELLHA
PATVCGPKKSTNLVKNKCVNFNFNGLTGTGVLTESNKKFLPFQQFGRDIADTTDAVRDPQTLEIL
DITPCSFGGVSVITPGTNTSNQVAVLYQNVNCTEVPVAIHADQLTPTWRVYSTGSNVFQTRAGCL
IGAEHVNNSYECDIPIGAGICASYQTQTNSPSRAGSVASQSIIAYTMSLGAENSVAYSNNSIAIP
TNFTISVTTEILPVSMTKTSVDCTMYICGDSTECSNLLLQYGSFCTQLNRALTGIAVEQDKNTQE
VFAQVKQIYKTPPIKDFGGFNFSQILPDPSKPSKRSFIEDLLFNKVTLADAGFIKQYGDCLGDIA
ARDLICAQKFNGLTVLPPLLTDEMIAQYTSALLAGTITSGWTFGAGPALQIPFAMQMAYRFNGIG
VTQNVLYENQKLIANQFNSAIGKIQDSLSSTPSPLGKLQDVVNQNAQALNTLVKQLSSNFGAISS
VLNDILSRLDPPEAEVQIDRLITGRLQSLQTYVTQQLIRAAEIRASANLAATKMSECVLGQSKRV
DFCGKGYHLMSFPQSAPHGVVFLHVTYVPAQEKNFTTAPAICHDGKAHFPREGVFVSNGTHWFVT
QRNFYEPQIITTDNTFVSGNCDVVIGIVNNTVYDPLQPELDSFKEELDKYFKNHTSPDVDLGDIS
GINASVVNIQKEIDRLNEVAKNLNESLIDLQELGKYEQYIKWPWYIWLGFIAGLIAIVMVTIMLC
CMTSCCSCLKGCCSCGSCCKFDEDDSEPVLKGVKLHYT
SEQ ID NO 210: SEQ ID NO 196 + D614N + A892P + T941P + K986P + V987P
MFVFLVLLPLVSSQCVNLTTRTQLPPAYTNSFTRGVYYPDKVFRSSVLHSTQDLFLPFFSNVTWF
HAIHVSGTNGTKRFDNPVLPFNDGVYFASTEKSNIIRGWIFGTTLDSKTQSLLIVNNATNVVIKV
CEFQFCNDPFLGVYYHKNNKSWMESEFRVYSSANNCTFEYVSQPFLMDLEGKQGNFKNLREFVFK
NIDGYFKIYSKHTPINLVRDLPQGFSALEPLVDLPIGINITRFQTLLALHRSYLTPGDSSSGWTA
GAAAYYVGYLQPRTFLLKYNENGTITDAVDCALDPLSETKCTLKSFTVEKGIYQTSNFRVQPTES
IVRFPNITNLCPFGEVFNATRFASVYAWNRKRISNCVADYSVLYNSASFSTFKCYGVSPTKLNDL
CFTNVYADSFVIRGDEVRQIAPGQTGKIADYNYKLPDDFTGCVIAWNSNNLDSKVGGNYNYLYRL
FRKSNLKPFERDISTEIYQAGSTPCNGVEGFNCYFPLQSYGFQPTNGVGYQPYRVVVLSFELLHA
PATVCGPKKSTNLVKNKCVNFNFNGLTGTGVLTESNKKFLPFQQFGRDIADTTDAVRDPQTLEIL
DITPCSFGGVSVITPGTNTSNQVAVLYQNVNCTEVPVAIHADQLTPTWRVYSTGSNVFQTRAGCL
IGAEHVNNSYECDIPIGAGICASYQTQTNSPSRAGSVASQSIIAYTMSLGAENSVAYSNNSIAIP
TNFTISVTTEILPVSMTKTSVDCTMYICGDSTECSNLLLQYGSFCTQLNRALTGIAVEQDKNTQE
VFAQVKQIYKTPPIKDFGGFNFSQILPDPSKPSKRSFIEDLLFNKVTLADAGFIKQYGDCLGDIA
ARDLICAQKFNGLTVLPPLLTDEMIAQYTSALLAGTITSGWTFGAGPALQIPFAMQMAYRFNGIG
VTQNVLYENQKLIANQFNSAIGKIQDSLSSPASALGKLQDVVNQNAQALNTLVKQLSSNFGAISS
VLNDILSRLDPPEAEVQIDRLITGRLQSLQTYVTQQLIRAAEIRASANLAATKMSECVLGQSKRV
DFCGKGYHLMSFPQSAPHGVVFLHVTYVPAQEKNFTTAPAICHDGKAHFPREGVFVSNGTHWFVT
QRNFYEPQIITTDNTFVSGNCDVVIGIVNNTVYDPLQPELDSFKEELDKYFKNHTSPDVDLGDIS
GINASVVNIQKEIDRLNEVAKNLNESLIDLQELGKYEQYIKWPWYIWLGFIAGLIAIVMVTIMLC
CMTSCCSCLKGCCSCGSCCKFDEDDSEPVLKGVKLHYT
SEQ ID NO 211: SEQ ID NO 196 + D614N + A892P + A944P + K986P + V987P
MFVFLVLLPLVSSQCVNLTTRTQLPPAYTNSFTRGVYYPDKVFRSSVLHSTQDLFLPFFSNVTWF
HAIHVSGTNGTKRFDNPVLPFNDGVYFASTEKSNIIRGWIFGTTLDSKTQSLLIVNNATNVVIKV
CEFQFCNDPFLGVYYHKNNKSWMESEFRVYSSANNCTFEYVSQPFLMDLEGKQGNFKNLREFVFK
NIDGYFKIYSKHTPINLVRDLPQGFSALEPLVDLPIGINITRFQTLLALHRSYLTPGDSSSGWTA
GAAAYYVGYLQPRTFLLKYNENGTITDAVDCALDPLSETKCTLKSFTVEKGIYQTSNFRVQPTES
IVRFPNITNLCPFGEVFNATRFASVYAWNRKRISNCVADYSVLYNSASFSTFKCYGVSPTKLNDL
CFTNVYADSFVIRGDEVRQIAPGQTGKIADYNYKLPDDFTGCVIAWNSNNLDSKVGGNYNYLYRL
FRKSNLKPFERDISTEIYQAGSTPCNGVEGFNCYFPLQSYGFQPTNGVGYQPYRVVVLSFELLHA
PATVCGPKKSTNLVKNKCVNFNFNGLTGTGVLTESNKKFLPFQQFGRDIADTTDAVRDPQTLEIL
DITPCSFGGVSVITPGTNTSNQVAVLYQNVNCTEVPVAIHADQLTPTWRVYSTGSNVFQTRAGCL
IGAEHVNNSYECDIPIGAGICASYQTQTNSPSRAGSVASQSIIAYTMSLGAENSVAYSNNSIAIP
TNFTISVTTEILPVSMTKTSVDCTMYICGDSTECSNLLLQYGSFCTQLNRALTGIAVEQDKNTQE
VFAQVKQIYKTPPIKDFGGFNFSQILPDPSKPSKRSFIEDLLFNKVTLADAGFIKQYGDCLGDIA
ARDLICAQKFNGLTVLPPLLTDEMIAQYTSALLAGTITSGWTFGAGPALQIPFAMQMAYRFNGIG
VTQNVLYENQKLIANQFNSAIGKIQDSLSSTASPLGKLQDVVNQNAQALNTLVKQLSSNFGAISS
VLNDILSRLDPPEAEVQIDRLITGRLQSLQTYVTQQLIRAAEIRASANLAATKMSECVLGQSKRV
DFCGKGYHLMSFPQSAPHGVVFLHVTYVPAQEKNFTTAPAICHDGKAHFPREGVFVSNGTHWFVT
QRNFYEPQIITTDNTFVSGNCDVVIGIVNNTVYDPLQPELDSFKEELDKYFKNHTSPDVDLGDIS
GINASVVNIQKEIDRLNEVAKNLNESLIDLQELGKYEQYIKWPWYIWLGFIAGLIAIVMVTIMLC
CMTSCCSCLKGCCSCGSCCKFDEDDSEPVLKGVKLHYT
SEQ ID NO 212: SEQ ID NO 1 + D614N + A892P + A942P
MFVFLVLLPLVSSQCVNLTTRTQLPPAYTNSFTRGVYYPDKVFRSSVLHSTQDLFLPFFSNVTWF
HAIHVSGTNGTKRFDNPVLPFNDGVYFASTEKSNIIRGWIFGTTLDSKTQSLLIVNNATNVVIKV
CEFQFCNDPFLGVYYHKNNKSWMESEFRVYSSANNCTFEYVSQPFLMDLEGKQGNFKNLREFVFK
NIDGYFKIYSKHTPINLVRDLPQGFSALEPLVDLPIGINITRFQTLLALHRSYLTPGDSSSGWTA
GAAAYYVGYLQPRTFLLKYNENGTITDAVDCALDPLSETKCTLKSFTVEKGIYQTSNFRVQPTES
IVRFPNITNLCPFGEVFNATRFASVYAWNRKRISNCVADYSVLYNSASFSTFKCYGVSPTKLNDL
CFTNVYADSFVIRGDEVRQIAPGQTGKIADYNYKLPDDFTGCVIAWNSNNLDSKVGGNYNYLYRL
FRKSNLKPFERDISTEIYQAGSTPCNGVEGFNCYFPLQSYGFQPTNGVGYQPYRVVVLSFELLHA
PATVCGPKKSTNLVKNKCVNFNFNGLTGTGVLTESNKKFLPFQQFGRDIADTTDAVRDPQTLEIL
DITPCSFGGVSVITPGTNTSNQVAVLYQNVNCTEVPVAIHADQLTPTWRVYSTGSNVFQTRAGCL
IGAEHVNNSYECDIPIGAGICASYQTQTNSPRRARSVASQSIIAYTMSLGAENSVAYSNNSIAIP
TNFTISVTTEILPVSMTKTSVDCTMYICGDSTECSNLLLQYGSFCTQLNRALTGIAVEQDKNTQE
VFAQVKQIYKTPPIKDFGGFNFSQILPDPSKPSKRSFIEDLLFNKVTLADAGFIKQYGDCLGDIA
ARDLICAQKFNGLTVLPPLLTDEMIAQYTSALLAGTITSGWTFGAGPALQIPFAMQMAYRFNGIG
VTQNVLYENQKLIANQFNSAIGKIQDSLSSTPSALGKLQDVVNQNAQALNTLVKQLSSNFGAISS
VLNDILSRLDKVEAEVQIDRLITGRLQSLQTYVTQQLIRAAEIRASANLAATKMSECVLGQSKRV
DFCGKGYHLMSFPQSAPHGVVFLHVTYVPAQEKNFTTAPAICHDGKAHFPREGVFVSNGTHWFVT
QRNFYEPQIITTDNTFVSGNCDVVIGIVNNTVYDPLQPELDSFKEELDKYFKNHTSPDVDLGDIS
GINASVVNIQKEIDRLNEVAKNLNESLIDLQELGKYEQYIKWPWYIWLGFIAGLIAIVMVTIMLC
CMTSCCSCLKGCCSCGSCCKFDEDDSEPVLKGVKLHYT
SEQ ID NO 213: SEQ ID NO 1 + D614N + A892P + A942P + T941P
MFVFLVLLPLVSSQCVNLTTRTQLPPAYTNSFTRGVYYPDKVFRSSVLHSTQDLFLPFFSNVTWF
HAIHVSGTNGTKRFDNPVLPFNDGVYFASTEKSNIIRGWIFGTTLDSKTQSLLIVNNATNVVIKV
CEFQFCNDPFLGVYYHKNNKSWMESEFRVYSSANNCTFEYVSQPFLMDLEGKQGNFKNLREFVFK
NIDGYFKIYSKHTPINLVRDLPQGFSALEPLVDLPIGINITRFQTLLALHRSYLTPGDSSSGWTA
GAAAYYVGYLQPRTFLLKYNENGTITDAVDCALDPLSETKCTLKSFTVEKGIYQTSNFRVQPTES
IVRFPNITNLCPFGEVFNATRFASVYAWNRKRISNCVADYSVLYNSASFSTFKCYGVSPTKLNDL
CFTNVYADSFVIRGDEVRQIAPGQTGKIADYNYKLPDDFTGCVIAWNSNNLDSKVGGNYNYLYRL
FRKSNLKPFERDISTEIYQAGSTPCNGVEGFNCYFPLQSYGFQPTNGVGYQPYRVVVLSFELLHA
PATVCGPKKSTNLVKNKCVNFNFNGLTGTGVLTESNKKFLPFQQFGRDIADTTDAVRDPQTLEIL
DITPCSFGGVSVITPGTNTSNQVAVLYQNVNCTEVPVAIHADQLTPTWRVYSTGSNVFQTRAGCL
IGAEHVNNSYECDIPIGAGICASYQTQTNSPRRARSVASQSIIAYTMSLGAENSVAYSNNSIAIP
TNFTISVTTEILPVSMTKTSVDCTMYICGDSTECSNLLLQYGSFCTQLNRALTGIAVEQDKNTQE
VFAQVKQIYKTPPIKDFGGFNFSQILPDPSKPSKRSFIEDLLFNKVTLADAGFIKQYGDCLGDIA
ARDLICAQKFNGLTVLPPLLTDEMIAQYTSALLAGTITSGWTFGAGPALQIPFAMQMAYRFNGIG
VTQNVLYENQKLIANQFNSAIGKIQDSLSSPPSALGKLQDVVNQNAQALNTLVKQLSSNFGAISS
VLNDILSRLDKVEAEVQIDRLITGRLQSLQTYVTQQLIRAAEIRASANLAATKMSECVLGQSKRV
DFCGKGYHLMSFPQSAPHGVVFLHVTYVPAQEKNFTTAPAICHDGKAHFPREGVFVSNGTHWFVT
QRNFYEPQIITTDNTFVSGNCDVVIGIVNNTVYDPLQPELDSFKEELDKYFKNHTSPDVDLGDIS
GINASVVNIQKEIDRLNEVAKNLNESLIDLQELGKYEQYIKWPWYIWLGFIAGLIAIVMVTIMLC
CMTSCCSCLKGCCSCGSCCKFDEDDSEPVLKGVKLHYT
SEQ ID NO 214: SEQ ID NO 1 + D614N + A892P + A942P + A944P
MFVFLVLLPLVSSQCVNLTTRTQLPPAYTNSFTRGVYYPDKVFRSSVLHSTQDLFLPFFSNVTWF
HAIHVSGTNGTKRFDNPVLPFNDGVYFASTEKSNIIRGWIFGTTLDSKTQSLLIVNNATNVVIKV
CEFQFCNDPFLGVYYHKNNKSWMESEFRVYSSANNCTFEYVSQPFLMDLEGKQGNFKNLREFVFK
NIDGYFKIYSKHTPINLVRDLPQGFSALEPLVDLPIGINITRFQTLLALHRSYLTPGDSSSGWTA
GAAAYYVGYLQPRTFLLKYNENGTITDAVDCALDPLSETKCTLKSFTVEKGIYQTSNFRVQPTES
IVRFPNITNLCPFGEVFNATRFASVYAWNRKRISNCVADYSVLYNSASFSTFKCYGVSPTKLNDL
CFTNVYADSFVIRGDEVRQIAPGQTGKIADYNYKLPDDFTGCVIAWNSNNLDSKVGGNYNYLYRL
FRKSNLKPFERDISTEIYQAGSTPCNGVEGFNCYFPLQSYGFQPTNGVGYQPYRVVVLSFELLHA
PATVCGPKKSTNLVKNKCVNFNFNGLTGTGVLTESNKKFLPFQQFGRDIADTTDAVRDPQTLEIL
DITPCSFGGVSVITPGTNTSNQVAVLYQNVNCTEVPVAIHADQLTPTWRVYSTGSNVFQTRAGCL
IGAEHVNNSYECDIPIGAGICASYQTQTNSPRRARSVASQSIIAYTMSLGAENSVAYSNNSIAIP
TNFTISVTTEILPVSMTKTSVDCTMYICGDSTECSNLLLQYGSFCTQLNRALTGIAVEQDKNTQE
VFAQVKQIYKTPPIKDFGGFNFSQILPDPSKPSKRSFIEDLLFNKVTLADAGFIKQYGDCLGDIA
ARDLICAQKFNGLTVLPPLLTDEMIAQYTSALLAGTITSGWTFGAGPALQIPFAMQMAYRFNGIG
VTQNVLYENQKLIANQFNSAIGKIQDSLSSTPSPLGKLQDVVNQNAQALNTLVKQLSSNFGAISS
VLNDILSRLDKVEAEVQIDRLITGRLQSLQTYVTQQLIRAAEIRASANLAATKMSECVLGQSKRV
DFCGKGYHLMSFPQSAPHGVVFLHVTYVPAQEKNFTTAPAICHDGKAHFPREGVFVSNGTHWFVT
QRNFYEPQIITTDNTFVSGNCDVVIGIVNNTVYDPLQPELDSFKEELDKYFKNHTSPDVDLGDIS
GINASVVNIQKEIDRLNEVAKNLNESLIDLQELGKYEQYIKWPWYIWLGFIAGLIAIVMVTIMLC
CMTSCCSCLKGCCSCGSCCKFDEDDSEPVLKGVKLHYT
SEQ ID NO 215: SEQ ID NO 1 + D614N + A892P + T941P
MFVFLVLLPLVSSQCVNLTTRTQLPPAYTNSFTRGVYYPDKVFRSSVLHSTQDLFLPFFSNVTWF
HAIHVSGTNGTKRFDNPVLPFNDGVYFASTEKSNIIRGWIFGTTLDSKTQSLLIVNNATNVVIKV
CEFQFCNDPFLGVYYHKNNKSWMESEFRVYSSANNCTFEYVSQPFLMDLEGKQGNFKNLREFVFK
NIDGYFKIYSKHTPINLVRDLPQGFSALEPLVDLPIGINITRFQTLLALHRSYLTPGDSSSGWTA
GAAAYYVGYLQPRTFLLKYNENGTITDAVDCALDPLSETKCTLKSFTVEKGIYQTSNFRVQPTES
IVRFPNITNLCPFGEVFNATRFASVYAWNRKRISNCVADYSVLYNSASFSTFKCYGVSPTKLNDL
CFTNVYADSFVIRGDEVRQIAPGQTGKIADYNYKLPDDFTGCVIAWNSNNLDSKVGGNYNYLYRL
FRKSNLKPFERDISTEIYQAGSTPCNGVEGFNCYFPLQSYGFQPTNGVGYQPYRVVVLSFELLHA
PATVCGPKKSTNLVKNKCVNFNFNGLTGTGVLTESNKKFLPFQQFGRDIADTTDAVRDPQTLEIL
DITPCSFGGVSVITPGTNTSNQVAVLYQNVNCTEVPVAIHADQLTPTWRVYSTGSNVFQTRAGCL
IGAEHVNNSYECDIPIGAGICASYQTQTNSPRRARSVASQSIIAYTMSLGAENSVAYSNNSIAIP
TNFTISVTTEILPVSMTKTSVDCTMYICGDSTECSNLLLQYGSFCTQLNRALTGIAVEQDKNTQE
VFAQVKQIYKTPPIKDFGGFNFSQILPDPSKPSKRSFIEDLLFNKVTLADAGFIKQYGDCLGDIA
ARDLICAQKFNGLTVLPPLLTDEMIAQYTSALLAGTITSGWTFGAGPALQIPFAMQMAYRFNGIG
VTQNVLYENQKLIANQFNSAIGKIQDSLSSPASALGKLQDVVNQNAQALNTLVKQLSSNFGAISS
VLNDILSRLDKVEAEVQIDRLITGRLQSLQTYVTQQLIRAAEIRASANLAATKMSECVLGQSKRV
DFCGKGYHLMSFPQSAPHGVVFLHVTYVPAQEKNFTTAPAICHDGKAHFPREGVFVSNGTHWFVT
QRNFYEPQIITTDNTFVSGNCDVVIGIVNNTVYDPLQPELDSFKEELDKYFKNHTSPDVDLGDIS
GINASVVNIQKEIDRLNEVAKNLNESLIDLQELGKYEQYIKWPWYIWLGFIAGLIAIVMVTIMLC
CMTSCCSCLKGCCSCGSCCKFDEDDSEPVLKGVKLHYT
SEQ ID NO 216: SEQ ID NO 1 + D614N + A892P + A944P
MFVFLVLLPLVSSQCVNLTTRTQLPPAYTNSFTRGVYYPDKVFRSSVLHSTQDLFLPFFSNVTWF
HAIHVSGTNGTKRFDNPVLPFNDGVYFASTEKSNIIRGWIFGTTLDSKTQSLLIVNNATNVVIKV
CEFQFCNDPFLGVYYHKNNKSWMESEFRVYSSANNCTFEYVSQPFLMDLEGKQGNFKNLREFVFK
NIDGYFKIYSKHTPINLVRDLPQGFSALEPLVDLPIGINITRFQTLLALHRSYLTPGDSSSGWTA
GAAAYYVGYLQPRTFLLKYNENGTITDAVDCALDPLSETKCTLKSFTVEKGIYQTSNFRVQPTES
IVRFPNITNLCPFGEVFNATRFASVYAWNRKRISNCVADYSVLYNSASFSTFKCYGVSPTKLNDL
CFTNVYADSFVIRGDEVRQIAPGQTGKIADYNYKLPDDFTGCVIAWNSNNLDSKVGGNYNYLYRL
FRKSNLKPFERDISTEIYQAGSTPCNGVEGFNCYFPLQSYGFQPTNGVGYQPYRVVVLSFELLHA
PATVCGPKKSTNLVKNKCVNFNFNGLTGTGVLTESNKKFLPFQQFGRDIADTTDAVRDPQTLEIL
DITPCSFGGVSVITPGTNTSNQVAVLYQNVNCTEVPVAIHADQLTPTWRVYSTGSNVFQTRAGCL
IGAEHVNNSYECDIPIGAGICASYQTQTNSPRRARSVASQSIIAYTMSLGAENSVAYSNNSIAIP
TNFTISVTTEILPVSMTKTSVDCTMYICGDSTECSNLLLQYGSFCTQLNRALTGIAVEQDKNTQE
VFAQVKQIYKTPPIKDFGGFNFSQILPDPSKPSKRSFIEDLLFNKVTLADAGFIKQYGDCLGDIA
ARDLICAQKFNGLTVLPPLLTDEMIAQYTSALLAGTITSGWTFGAGPALQIPFAMQMAYRFNGIG
VTQNVLYENQKLIANQFNSAIGKIQDSLSSTASPLGKLQDVVNQNAQALNTLVKQLSSNFGAISS
VLNDILSRLDKVEAEVQIDRLITGRLQSLQTYVTQQLIRAAEIRASANLAATKMSECVLGQSKRV
DFCGKGYHLMSFPQSAPHGVVFLHVTYVPAQEKNFTTAPAICHDGKAHFPREGVFVSNGTHWFVT
QRNFYEPQIITTDNTFVSGNCDVVIGIVNNTVYDPLQPELDSFKEELDKYFKNHTSPDVDLGDIS
GINASVVNIQKEIDRLNEVAKNLNESLIDLQELGKYEQYIKWPWYIWLGFIAGLIAIVMVTIMLC
CMTSCCSCLKGCCSCGSCCKFDEDDSEPVLKGVKLHYT
SEQ ID NO 217: SEQ ID NO 1 + D614N + A892P + A942P + V987P
MFVFLVLLPLVSSQCVNLTTRTQLPPAYTNSFTRGVYYPDKVFRSSVLHSTQDLFLPFFSNVTWF
HAIHVSGTNGTKRFDNPVLPFNDGVYFASTEKSNIIRGWIFGTTLDSKTQSLLIVNNATNVVIKV
CEFQFCNDPFLGVYYHKNNKSWMESEFRVYSSANNCTFEYVSQPFLMDLEGKQGNFKNLREFVFK
NIDGYFKIYSKHTPINLVRDLPQGFSALEPLVDLPIGINITRFQTLLALHRSYLTPGDSSSGWTA
GAAAYYVGYLQPRTFLLKYNENGTITDAVDCALDPLSETKCTLKSFTVEKGIYQTSNFRVQPTES
IVRFPNITNLCPFGEVFNATRFASVYAWNRKRISNCVADYSVLYNSASFSTFKCYGVSPTKLNDL
CFTNVYADSFVIRGDEVRQIAPGQTGKIADYNYKLPDDFTGCVIAWNSNNLDSKVGGNYNYLYRL
FRKSNLKPFERDISTEIYQAGSTPCNGVEGFNCYFPLQSYGFQPTNGVGYQPYRVVVLSFELLHA
PATVCGPKKSTNLVKNKCVNFNFNGLTGTGVLTESNKKFLPFQQFGRDIADTTDAVRDPQTLEIL
DITPCSFGGVSVITPGTNTSNQVAVLYQNVNCTEVPVAIHADQLTPTWRVYSTGSNVFQTRAGCL
IGAEHVNNSYECDIPIGAGICASYQTQTNSPRRARSVASQSIIAYTMSLGAENSVAYSNNSIAIP
TNFTISVTTEILPVSMTKTSVDCTMYICGDSTECSNLLLQYGSFCTQLNRALTGIAVEQDKNTQE
VFAQVKQIYKTPPIKDFGGFNFSQILPDPSKPSKRSFIEDLLFNKVTLADAGFIKQYGDCLGDIA
ARDLICAQKFNGLTVLPPLLTDEMIAQYTSALLAGTITSGWTFGAGPALQIPFAMQMAYRFNGIG
VTQNVLYENQKLIANQFNSAIGKIQDSLSSTPSALGKLQDVVNQNAQALNTLVKQLSSNFGAISS
VLNDILSRLDKPEAEVQIDRLITGRLQSLQTYVTQQLIRAAEIRASANLAATKMSECVLGQSKRV
DFCGKGYHLMSFPQSAPHGVVFLHVTYVPAQEKNFTTAPAICHDGKAHFPREGVFVSNGTHWFVT
QRNFYEPQIITTDNTFVSGNCDVVIGIVNNTVYDPLQPELDSFKEELDKYFKNHTSPDVDLGDIS
GINASVVNIQKEIDRLNEVAKNLNESLIDLQELGKYEQYIKWPWYIWLGFIAGLIAIVMVTIMLC
CMTSCCSCLKGCCSCGSCCKFDEDDSEPVLKGVKLHYT
SEQ ID NO 218: SEQ ID NO 1 + D614N + A892P + A942P + T941P + V987P
MFVFLVLLPLVSSQCVNLTTRTQLPPAYTNSFTRGVYYPDKVFRSSVLHSTQDLFLPFFSNVTWF
HAIHVSGTNGTKRFDNPVLPFNDGVYFASTEKSNIIRGWIFGTTLDSKTQSLLIVNNATNVVIKV
CEFQFCNDPFLGVYYHKNNKSWMESEFRVYSSANNCTFEYVSQPFLMDLEGKQGNFKNLREFVFK
NIDGYFKIYSKHTPINLVRDLPQGFSALEPLVDLPIGINITRFQTLLALHRSYLTPGDSSSGWTA
GAAAYYVGYLQPRTFLLKYNENGTITDAVDCALDPLSETKCTLKSFTVEKGIYQTSNFRVQPTES
IVRFPNITNLCPFGEVFNATRFASVYAWNRKRISNCVADYSVLYNSASFSTFKCYGVSPTKLNDL
CFTNVYADSFVIRGDEVRQIAPGQTGKIADYNYKLPDDFTGCVIAWNSNNLDSKVGGNYNYLYRL
FRKSNLKPFERDISTEIYQAGSTPCNGVEGFNCYFPLQSYGFQPTNGVGYQPYRVVVLSFELLHA
PATVCGPKKSTNLVKNKCVNFNFNGLTGTGVLTESNKKFLPFQQFGRDIADTTDAVRDPQTLEIL
DITPCSFGGVSVITPGTNTSNQVAVLYQNVNCTEVPVAIHADQLTPTWRVYSTGSNVFQTRAGCL
IGAEHVNNSYECDIPIGAGICASYQTQTNSPRRARSVASQSIIAYTMSLGAENSVAYSNNSIAIP
TNFTISVTTEILPVSMTKTSVDCTMYICGDSTECSNLLLQYGSFCTQLNRALTGIAVEQDKNTQE
VFAQVKQIYKTPPIKDFGGFNFSQILPDPSKPSKRSFIEDLLFNKVTLADAGFIKQYGDCLGDIA
ARDLICAQKFNGLTVLPPLLTDEMIAQYTSALLAGTITSGWTFGAGPALQIPFAMQMAYRFNGIG
VTQNVLYENQKLIANQFNSAIGKIQDSLSSPPSALGKLQDVVNQNAQALNTLVKQLSSNFGAISS
VLNDILSRLDKPEAEVQIDRLITGRLQSLQTYVTQQLIRAAEIRASANLAATKMSECVLGQSKRV
DFCGKGYHLMSFPQSAPHGVVFLHVTYVPAQEKNFTTAPAICHDGKAHFPREGVFVSNGTHWFVT
QRNFYEPQIITTDNTFVSGNCDVVIGIVNNTVYDPLQPELDSFKEELDKYFKNHTSPDVDLGDIS
GINASVVNIQKEIDRLNEVAKNLNESLIDLQELGKYEQYIKWPWYIWLGFIAGLIAIVMVTIMLC
CMTSCCSCLKGCCSCGSCCKFDEDDSEPVLKGVKLHYT
SEQ ID NO 219: SEQ ID NO 1 + D614N + A892P + A942P + A944P + V987P
MFVFLVLLPLVSSQCVNLTTRTQLPPAYTNSFTRGVYYPDKVFRSSVLHSTQDLFLPFFSNVTWF
HAIHVSGTNGTKRFDNPVLPFNDGVYFASTEKSNIIRGWIFGTTLDSKTQSLLIVNNATNVVIKV
CEFQFCNDPFLGVYYHKNNKSWMESEFRVYSSANNCTFEYVSQPFLMDLEGKQGNFKNLREFVFK
NIDGYFKIYSKHTPINLVRDLPQGFSALEPLVDLPIGINITRFQTLLALHRSYLTPGDSSSGWTA
GAAAYYVGYLQPRTFLLKYNENGTITDAVDCALDPLSETKCTLKSFTVEKGIYQTSNFRVQPTES
IVRFPNITNLCPFGEVFNATRFASVYAWNRKRISNCVADYSVLYNSASFSTFKCYGVSPTKLNDL
CFTNVYADSFVIRGDEVRQIAPGQTGKIADYNYKLPDDFTGCVIAWNSNNLDSKVGGNYNYLYRL
FRKSNLKPFERDISTEIYQAGSTPCNGVEGFNCYFPLQSYGFQPTNGVGYQPYRVVVLSFELLHA
PATVCGPKKSTNLVKNKCVNFNFNGLTGTGVLTESNKKFLPFQQFGRDIADTTDAVRDPQTLEIL
DITPCSFGGVSVITPGTNTSNQVAVLYQNVNCTEVPVAIHADQLTPTWRVYSTGSNVFQTRAGCL
IGAEHVNNSYECDIPIGAGICASYQTQTNSPRRARSVASQSIIAYTMSLGAENSVAYSNNSIAIP
TNFTISVTTEILPVSMTKTSVDCTMYICGDSTECSNLLLQYGSFCTQLNRALTGIAVEQDKNTQE
VFAQVKQIYKTPPIKDFGGFNFSQILPDPSKPSKRSFIEDLLFNKVTLADAGFIKQYGDCLGDIA
ARDLICAQKFNGLTVLPPLLTDEMIAQYTSALLAGTITSGWTFGAGPALQIPFAMQMAYRFNGIG
VTQNVLYENQKLIANQFNSAIGKIQDSLSSTPSPLGKLQDVVNQNAQALNTLVKQLSSNFGAISS
VLNDILSRLDKPEAEVQIDRLITGRLQSLQTYVTQQLIRAAEIRASANLAATKMSECVLGQSKRV
DFCGKGYHLMSFPQSAPHGVVFLHVTYVPAQEKNFTTAPAICHDGKAHFPREGVFVSNGTHWFVT
QRNFYEPQIITTDNTFVSGNCDVVIGIVNNTVYDPLQPELDSFKEELDKYFKNHTSPDVDLGDIS
GINASVVNIQKEIDRLNEVAKNLNESLIDLQELGKYEQYIKWPWYIWLGFIAGLIAIVMVTIMLC
CMTSCCSCLKGCCSCGSCCKFDEDDSEPVLKGVKLHYT
SEQ ID NO 220: SEQ ID NO 1 + D614N + A892P + T941P + V987P
MFVFLVLLPLVSSQCVNLTTRTQLPPAYTNSFTRGVYYPDKVFRSSVLHSTQDLFLPFFSNVTWF
HAIHVSGTNGTKRFDNPVLPFNDGVYFASTEKSNIIRGWIFGTTLDSKTQSLLIVNNATNVVIKV
CEFQFCNDPFLGVYYHKNNKSWMESEFRVYSSANNCTFEYVSQPFLMDLEGKQGNFKNLREFVFK
NIDGYFKIYSKHTPINLVRDLPQGFSALEPLVDLPIGINITRFQTLLALHRSYLTPGDSSSGWTA
GAAAYYVGYLQPRTFLLKYNENGTITDAVDCALDPLSETKCTLKSFTVEKGIYQTSNFRVQPTES
IVRFPNITNLCPFGEVFNATRFASVYAWNRKRISNCVADYSVLYNSASFSTFKCYGVSPTKLNDL
CFTNVYADSFVIRGDEVRQIAPGQTGKIADYNYKLPDDFTGCVIAWNSNNLDSKVGGNYNYLYRL
FRKSNLKPFERDISTEIYQAGSTPCNGVEGFNCYFPLQSYGFQPTNGVGYQPYRVVVLSFELLHA
PATVCGPKKSTNLVKNKCVNFNFNGLTGTGVLTESNKKFLPFQQFGRDIADTTDAVRDPQTLEIL
DITPCSFGGVSVITPGTNTSNQVAVLYQNVNCTEVPVAIHADQLTPTWRVYSTGSNVFQTRAGCL
IGAEHVNNSYECDIPIGAGICASYQTQTNSPRRARSVASQSIIAYTMSLGAENSVAYSNNSIAIP
TNFTISVTTEILPVSMTKTSVDCTMYICGDSTECSNLLLQYGSFCTQLNRALTGIAVEQDKNTQE
VFAQVKQIYKTPPIKDFGGFNFSQILPDPSKPSKRSFIEDLLFNKVTLADAGFIKQYGDCLGDIA
ARDLICAQKFNGLTVLPPLLTDEMIAQYTSALLAGTITSGWTFGAGPALQIPFAMQMAYRFNGIG
VTQNVLYENQKLIANQFNSAIGKIQDSLSSPASALGKLQDVVNQNAQALNTLVKQLSSNFGAISS
VLNDILSRLDKPEAEVQIDRLITGRLQSLQTYVTQQLIRAAEIRASANLAATKMSECVLGQSKRV
DFCGKGYHLMSFPQSAPHGVVFLHVTYVPAQEKNFTTAPAICHDGKAHFPREGVFVSNGTHWFVT
QRNFYEPQIITTDNTFVSGNCDVVIGIVNNTVYDPLQPELDSFKEELDKYFKNHTSPDVDLGDIS
GINASVVNIQKEIDRLNEVAKNLNESLIDLQELGKYEQYIKWPWYIWLGFIAGLIAIVMVTIMLC
CMTSCCSCLKGCCSCGSCCKFDEDDSEPVLKGVKLHYT
SEQ ID NO 221: SEQ ID NO 1 + D614N + A892P + A944P + V987P
MFVFLVLLPLVSSQCVNLTTRTQLPPAYTNSFTRGVYYPDKVFRSSVLHSTQDLFLPFFSNVTWF
HAIHVSGTNGTKRFDNPVLPFNDGVYFASTEKSNIIRGWIFGTTLDSKTQSLLIVNNATNVVIKV
CEFQFCNDPFLGVYYHKNNKSWMESEFRVYSSANNCTFEYVSQPFLMDLEGKQGNFKNLREFVFK
NIDGYFKIYSKHTPINLVRDLPQGFSALEPLVDLPIGINITRFQTLLALHRSYLTPGDSSSGWTA
GAAAYYVGYLQPRTFLLKYNENGTITDAVDCALDPLSETKCTLKSFTVEKGIYQTSNFRVQPTES
IVRFPNITNLCPFGEVFNATRFASVYAWNRKRISNCVADYSVLYNSASFSTFKCYGVSPTKLNDL
CFTNVYADSFVIRGDEVRQIAPGQTGKIADYNYKLPDDFTGCVIAWNSNNLDSKVGGNYNYLYRL
FRKSNLKPFERDISTEIYQAGSTPCNGVEGFNCYFPLQSYGFQPTNGVGYQPYRVVVLSFELLHA
PATVCGPKKSTNLVKNKCVNFNFNGLTGTGVLTESNKKFLPFQQFGRDIADTTDAVRDPQTLEIL
DITPCSFGGVSVITPGTNTSNQVAVLYQNVNCTEVPVAIHADQLTPTWRVYSTGSNVFQTRAGCL
IGAEHVNNSYECDIPIGAGICASYQTQTNSPRRARSVASQSIIAYTMSLGAENSVAYSNNSIAIP
TNFTISVTTEILPVSMTKTSVDCTMYICGDSTECSNLLLQYGSFCTQLNRALTGIAVEQDKNTQE
VFAQVKQIYKTPPIKDFGGFNFSQILPDPSKPSKRSFIEDLLFNKVTLADAGFIKQYGDCLGDIA
ARDLICAQKFNGLTVLPPLLTDEMIAQYTSALLAGTITSGWTFGAGPALQIPFAMQMAYRFNGIG
VTQNVLYENQKLIANQFNSAIGKIQDSLSSTASPLGKLQDVVNQNAQALNTLVKQLSSNFGAISS
VLNDILSRLDKPEAEVQIDRLITGRLQSLQTYVTQQLIRAAEIRASANLAATKMSECVLGQSKRV
DFCGKGYHLMSFPQSAPHGVVFLHVTYVPAQEKNFTTAPAICHDGKAHFPREGVFVSNGTHWFVT
QRNFYEPQIITTDNTFVSGNCDVVIGIVNNTVYDPLQPELDSFKEELDKYFKNHTSPDVDLGDIS
GINASVVNIQKEIDRLNEVAKNLNESLIDLQELGKYEQYIKWPWYIWLGFIAGLIAIVMVTIMLC
CMTSCCSCLKGCCSCGSCCKFDEDDSEPVLKGVKLHYT
SEQ ID NO 222: SEQ ID NO 1 + D614N + A892P + A942P + K986P + V987P
MFVFLVLLPLVSSQCVNLTTRTQLPPAYTNSFTRGVYYPDKVFRSSVLHSTQDLFLPFFSNVTWF
HAIHVSGTNGTKRFDNPVLPFNDGVYFASTEKSNIIRGWIFGTTLDSKTQSLLIVNNATNVVIKV
CEFQFCNDPFLGVYYHKNNKSWMESEFRVYSSANNCTFEYVSQPFLMDLEGKQGNFKNLREFVFK
NIDGYFKIYSKHTPINLVRDLPQGFSALEPLVDLPIGINITRFQTLLALHRSYLTPGDSSSGWTA
GAAAYYVGYLQPRTFLLKYNENGTITDAVDCALDPLSETKCTLKSFTVEKGIYQTSNFRVQPTES
IVRFPNITNLCPFGEVFNATRFASVYAWNRKRISNCVADYSVLYNSASFSTFKCYGVSPTKLNDL
CFTNVYADSFVIRGDEVRQIAPGQTGKIADYNYKLPDDFTGCVIAWNSNNLDSKVGGNYNYLYRL
FRKSNLKPFERDISTEIYQAGSTPCNGVEGFNCYFPLQSYGFQPTNGVGYQPYRVVVLSFELLHA
PATVCGPKKSTNLVKNKCVNFNFNGLTGTGVLTESNKKFLPFQQFGRDIADTTDAVRDPQTLEIL
DITPCSFGGVSVITPGTNTSNQVAVLYQNVNCTEVPVAIHADQLTPTWRVYSTGSNVFQTRAGCL
IGAEHVNNSYECDIPIGAGICASYQTQTNSPRRARSVASQSIIAYTMSLGAENSVAYSNNSIAIP
TNFTISVTTEILPVSMTKTSVDCTMYICGDSTECSNLLLQYGSFCTQLNRALTGIAVEQDKNTQE
VFAQVKQIYKTPPIKDFGGFNFSQILPDPSKPSKRSFIEDLLFNKVTLADAGFIKQYGDCLGDIA
ARDLICAQKFNGLTVLPPLLTDEMIAQYTSALLAGTITSGWTFGAGPALQIPFAMQMAYRFNGIG
VTQNVLYENQKLIANQFNSAIGKIQDSLSSTPSALGKLQDVVNQNAQALNTLVKQLSSNFGAISS
VLNDILSRLDPPEAEVQIDRLITGRLQSLQTYVTQQLIRAAEIRASANLAATKMSECVLGQSKRV
DFCGKGYHLMSFPQSAPHGVVFLHVTYVPAQEKNFTTAPAICHDGKAHFPREGVFVSNGTHWFVT
QRNFYEPQIITTDNTFVSGNCDVVIGIVNNTVYDPLQPELDSFKEELDKYFKNHTSPDVDLGDIS
GINASVVNIQKEIDRLNEVAKNLNESLIDLQELGKYEQYIKWPWYIWLGFIAGLIAIVMVTIMLC
CMTSCCSCLKGCCSCGSCCKFDEDDSEPVLKGVKLHYT
SEQ ID NO 223: SEQ ID NO 1 + D614N + A892P + A942P + T941P + K986P + V987P
MFVFLVLLPLVSSQCVNLTTRTQLPPAYTNSFTRGVYYPDKVFRSSVLHSTQDLFLPFFSNVTWF
HAIHVSGTNGTKRFDNPVLPFNDGVYFASTEKSNIIRGWIFGTTLDSKTQSLLIVNNATNVVIKV
CEFQFCNDPFLGVYYHKNNKSWMESEFRVYSSANNCTFEYVSQPFLMDLEGKQGNFKNLREFVFK
NIDGYFKIYSKHTPINLVRDLPQGFSALEPLVDLPIGINITRFQTLLALHRSYLTPGDSSSGWTA
GAAAYYVGYLQPRTFLLKYNENGTITDAVDCALDPLSETKCTLKSFTVEKGIYQTSNFRVQPTES
IVRFPNITNLCPFGEVFNATRFASVYAWNRKRISNCVADYSVLYNSASFSTFKCYGVSPTKLNDL
CFTNVYADSFVIRGDEVRQIAPGQTGKIADYNYKLPDDFTGCVIAWNSNNLDSKVGGNYNYLYRL
FRKSNLKPFERDISTEIYQAGSTPCNGVEGFNCYFPLQSYGFQPTNGVGYQPYRVVVLSFELLHA
PATVCGPKKSTNLVKNKCVNFNFNGLTGTGVLTESNKKFLPFQQFGRDIADTTDAVRDPQTLEIL
DITPCSFGGVSVITPGTNTSNQVAVLYQNVNCTEVPVAIHADQLTPTWRVYSTGSNVFQTRAGCL
IGAEHVNNSYECDIPIGAGICASYQTQTNSPRRARSVASQSIIAYTMSLGAENSVAYSNNSIAIP
TNFTISVTTEILPVSMTKTSVDCTMYICGDSTECSNLLLQYGSFCTQLNRALTGIAVEQDKNTQE
VFAQVKQIYKTPPIKDFGGFNFSQILPDPSKPSKRSFIEDLLFNKVTLADAGFIKQYGDCLGDIA
ARDLICAQKFNGLTVLPPLLTDEMIAQYTSALLAGTITSGWTFGAGPALQIPFAMQMAYRFNGIG
VTQNVLYENQKLIANQFNSAIGKIQDSLSSPPSALGKLQDVVNQNAQALNTLVKQLSSNFGAISS
VLNDILSRLDPPEAEVQIDRLITGRLQSLQTYVTQQLIRAAEIRASANLAATKMSECVLGQSKRV
DFCGKGYHLMSFPQSAPHGVVFLHVTYVPAQEKNFTTAPAICHDGKAHFPREGVFVSNGTHWFVT
QRNFYEPQIITTDNTFVSGNCDVVIGIVNNTVYDPLQPELDSFKEELDKYFKNHTSPDVDLGDIS
GINASVVNIQKEIDRLNEVAKNLNESLIDLQELGKYEQYIKWPWYIWLGFIAGLIAIVMVTIMLC
CMTSCCSCLKGCCSCGSCCKFDEDDSEPVLKGVKLHYT
SEQ ID NO 224: SEQ ID NO 1 + D614N + A892P + A942P + A944P + K986P + V987P
MFVFLVLLPLVSSQCVNLTTRTQLPPAYTNSFTRGVYYPDKVFRSSVLHSTQDLFLPFFSNVTWF
HAIHVSGTNGTKRFDNPVLPFNDGVYFASTEKSNIIRGWIFGTTLDSKTQSLLIVNNATNVVIKV
CEFQFCNDPFLGVYYHKNNKSWMESEFRVYSSANNCTFEYVSQPFLMDLEGKQGNFKNLREFVFK
NIDGYFKIYSKHTPINLVRDLPQGFSALEPLVDLPIGINITRFQTLLALHRSYLTPGDSSSGWTA
GAAAYYVGYLQPRTFLLKYNENGTITDAVDCALDPLSETKCTLKSFTVEKGIYQTSNFRVQPTES
IVRFPNITNLCPFGEVFNATRFASVYAWNRKRISNCVADYSVLYNSASFSTFKCYGVSPTKLNDL
CFTNVYADSFVIRGDEVRQIAPGQTGKIADYNYKLPDDFTGCVIAWNSNNLDSKVGGNYNYLYRL
FRKSNLKPFERDISTEIYQAGSTPCNGVEGFNCYFPLQSYGFQPTNGVGYQPYRVVVLSFELLHA
PATVCGPKKSTNLVKNKCVNFNFNGLTGTGVLTESNKKFLPFQQFGRDIADTTDAVRDPQTLEIL
DITPCSFGGVSVITPGTNTSNQVAVLYQNVNCTEVPVAIHADQLTPTWRVYSTGSNVFQTRAGCL
IGAEHVNNSYECDIPIGAGICASYQTQTNSPRRARSVASQSIIAYTMSLGAENSVAYSNNSIAIP
TNFTISVTTEILPVSMTKTSVDCTMYICGDSTECSNLLLQYGSFCTQLNRALTGIAVEQDKNTQE
VFAQVKQIYKTPPIKDFGGFNFSQILPDPSKPSKRSFIEDLLFNKVTLADAGFIKQYGDCLGDIA
ARDLICAQKFNGLTVLPPLLTDEMIAQYTSALLAGTITSGWTFGAGPALQIPFAMQMAYRFNGIG
VTQNVLYENQKLIANQFNSAIGKIQDSLSSTPSPLGKLQDVVNQNAQALNTLVKQLSSNFGAISS
VLNDILSRLDPPEAEVQIDRLITGRLQSLQTYVTQQLIRAAEIRASANLAATKMSECVLGQSKRV
DFCGKGYHLMSFPQSAPHGVVFLHVTYVPAQEKNFTTAPAICHDGKAHFPREGVFVSNGTHWFVT
QRNFYEPQIITTDNTFVSGNCDVVIGIVNNTVYDPLQPELDSFKEELDKYFKNHTSPDVDLGDIS
GINASVVNIQKEIDRLNEVAKNLNESLIDLQELGKYEQYIKWPWYIWLGFIAGLIAIVMVTIMLC
CMTSCCSCLKGCCSCGSCCKFDEDDSEPVLKGVKLHYT
SEQ ID NO 225: SEQ ID NO 1 + D614N + A892P + T941P + K986P + V987P
MFVFLVLLPLVSSQCVNLTTRTQLPPAYTNSFTRGVYYPDKVFRSSVLHSTQDLFLPFFSNVTWF
HAIHVSGTNGTKRFDNPVLPFNDGVYFASTEKSNIIRGWIFGTTLDSKTQSLLIVNNATNVVIKV
CEFQFCNDPFLGVYYHKNNKSWMESEFRVYSSANNCTFEYVSQPFLMDLEGKQGNFKNLREFVFK
NIDGYFKIYSKHTPINLVRDLPQGFSALEPLVDLPIGINITRFQTLLALHRSYLTPGDSSSGWTA
GAAAYYVGYLQPRTFLLKYNENGTITDAVDCALDPLSETKCTLKSFTVEKGIYQTSNFRVQPTES
IVRFPNITNLCPFGEVFNATRFASVYAWNRKRISNCVADYSVLYNSASFSTFKCYGVSPTKLNDL
CFTNVYADSFVIRGDEVRQIAPGQTGKIADYNYKLPDDFTGCVIAWNSNNLDSKVGGNYNYLYRL
FRKSNLKPFERDISTEIYQAGSTPCNGVEGFNCYFPLQSYGFQPTNGVGYQPYRVVVLSFELLHA
PATVCGPKKSTNLVKNKCVNFNFNGLTGTGVLTESNKKFLPFQQFGRDIADTTDAVRDPQTLEIL
DITPCSFGGVSVITPGTNTSNQVAVLYQNVNCTEVPVAIHADQLTPTWRVYSTGSNVFQTRAGCL
IGAEHVNNSYECDIPIGAGICASYQTQTNSPRRARSVASQSIIAYTMSLGAENSVAYSNNSIAIP
TNFTISVTTEILPVSMTKTSVDCTMYICGDSTECSNLLLQYGSFCTQLNRALTGIAVEQDKNTQE
VFAQVKQIYKTPPIKDFGGFNFSQILPDPSKPSKRSFIEDLLFNKVTLADAGFIKQYGDCLGDIA
ARDLICAQKFNGLTVLPPLLTDEMIAQYTSALLAGTITSGWTFGAGPALQIPFAMQMAYRFNGIG
VTQNVLYENQKLIANQFNSAIGKIQDSLSSPASALGKLQDVVNQNAQALNTLVKQLSSNFGAISS
VLNDILSRLDPPEAEVQIDRLITGRLQSLQTYVTQQLIRAAEIRASANLAATKMSECVLGQSKRV
DFCGKGYHLMSFPQSAPHGVVFLHVTYVPAQEKNFTTAPAICHDGKAHFPREGVFVSNGTHWFVT
QRNFYEPQIITTDNTFVSGNCDVVIGIVNNTVYDPLQPELDSFKEELDKYFKNHTSPDVDLGDIS
GINASVVNIQKEIDRLNEVAKNLNESLIDLQELGKYEQYIKWPWYIWLGFIAGLIAIVMVTIMLC
CMTSCCSCLKGCCSCGSCCKFDEDDSEPVLKGVKLHYT
SEQ ID NO 226: SEQ ID NO 1 + D614N + A892P + A944P + K986P + V987P
MFVFLVLLPLVSSQCVNLTTRTQLPPAYTNSFTRGVYYPDKVFRSSVLHSTQDLFLPFFSNVTWF
HAIHVSGTNGTKRFDNPVLPFNDGVYFASTEKSNIIRGWIFGTTLDSKTQSLLIVNNATNVVIKV
CEFQFCNDPFLGVYYHKNNKSWMESEFRVYSSANNCTFEYVSQPFLMDLEGKQGNFKNLREFVFK
NIDGYFKIYSKHTPINLVRDLPQGFSALEPLVDLPIGINITRFQTLLALHRSYLTPGDSSSGWTA
GAAAYYVGYLQPRTFLLKYNENGTITDAVDCALDPLSETKCTLKSFTVEKGIYQTSNFRVQPTES
IVRFPNITNLCPFGEVFNATRFASVYAWNRKRISNCVADYSVLYNSASFSTFKCYGVSPTKLNDL
CFTNVYADSFVIRGDEVRQIAPGQTGKIADYNYKLPDDFTGCVIAWNSNNLDSKVGGNYNYLYRL
FRKSNLKPFERDISTEIYQAGSTPCNGVEGFNCYFPLQSYGFQPTNGVGYQPYRVVVLSFELLHA
PATVCGPKKSTNLVKNKCVNFNFNGLTGTGVLTESNKKFLPFQQFGRDIADTTDAVRDPQTLEIL
DITPCSFGGVSVITPGTNTSNQVAVLYQNVNCTEVPVAIHADQLTPTWRVYSTGSNVFQTRAGCL
IGAEHVNNSYECDIPIGAGICASYQTQTNSPRRARSVASQSIIAYTMSLGAENSVAYSNNSIAIP
TNFTISVTTEILPVSMTKTSVDCTMYICGDSTECSNLLLQYGSFCTQLNRALTGIAVEQDKNTQE
VFAQVKQIYKTPPIKDFGGFNFSQILPDPSKPSKRSFIEDLLFNKVTLADAGFIKQYGDCLGDIA
ARDLICAQKFNGLTVLPPLLTDEMIAQYTSALLAGTITSGWTFGAGPALQIPFAMQMAYRFNGIG
VTQNVLYENQKLIANQFNSAIGKIQDSLSSTASPLGKLQDVVNQNAQALNTLVKQLSSNFGAISS
VLNDILSRLDPPEAEVQIDRLITGRLQSLQTYVTQQLIRAAEIRASANLAATKMSECVLGQSKRV
DFCGKGYHLMSFPQSAPHGVVFLHVTYVPAQEKNFTTAPAICHDGKAHFPREGVFVSNGTHWFVT
QRNFYEPQIITTDNTFVSGNCDVVIGIVNNTVYDPLQPELDSFKEELDKYFKNHTSPDVDLGDIS
GINASVVNIQKEIDRLNEVAKNLNESLIDLQELGKYEQYIKWPWYIWLGFIAGLIAIVMVTIMLC
CMTSCCSCLKGCCSCGSCCKFDEDDSEPVLKGVKLHYT
SEQ ID NO 227: SEQ ID NO 1 + A942P
MFVFLVLLPLVSSQCVNLTTRTQLPPAYTNSFTRGVYYPDKVFRSSVLHSTQDLFLPFFSNVTWF
HAIHVSGTNGTKRFDNPVLPFNDGVYFASTEKSNIIRGWIFGTTLDSKTQSLLIVNNATNVVIKV
CEFQFCNDPFLGVYYHKNNKSWMESEFRVYSSANNCTFEYVSQPFLMDLEGKQGNFKNLREFVFK
NIDGYFKIYSKHTPINLVRDLPQGFSALEPLVDLPIGINITRFQTLLALHRSYLTPGDSSSGWTA
GAAAYYVGYLQPRTFLLKYNENGTITDAVDCALDPLSETKCTLKSFTVEKGIYQTSNFRVQPTES
IVRFPNITNLCPFGEVFNATRFASVYAWNRKRISNCVADYSVLYNSASFSTFKCYGVSPTKLNDL
CFTNVYADSFVIRGDEVRQIAPGQTGKIADYNYKLPDDFTGCVIAWNSNNLDSKVGGNYNYLYRL
FRKSNLKPFERDISTEIYQAGSTPCNGVEGFNCYFPLQSYGFQPTNGVGYQPYRVVVLSFELLHA
PATVCGPKKSTNLVKNKCVNFNFNGLTGTGVLTESNKKFLPFQQFGRDIADTTDAVRDPQTLEIL
DITPCSFGGVSVITPGTNTSNQVAVLYQDVNCTEVPVAIHADQLTPTWRVYSTGSNVFQTRAGCL
IGAEHVNNSYECDIPIGAGICASYQTQTNSPRRARSVASQSIIAYTMSLGAENSVAYSNNSIAIP
TNFTISVTTEILPVSMTKTSVDCTMYICGDSTECSNLLLQYGSFCTQLNRALTGIAVEQDKNTQE
VFAQVKQIYKTPPIKDFGGFNFSQILPDPSKPSKRSFIEDLLFNKVTLADAGFIKQYGDCLGDIA
ARDLICAQKFNGLTVLPPLLTDEMIAQYTSALLAGTITSGWTFGAGAALQIPFAMQMAYRFNGIG
VTQNVLYENQKLIANQFNSAIGKIQDSLSSTPSALGKLQDVVNQNAQALNTLVKQLSSNFGAISS
VLNDILSRLDKVEAEVQIDRLITGRLQSLQTYVTQQLIRAAEIRASANLAATKMSECVLGQSKRV
DFCGKGYHLMSFPQSAPHGVVFLHVTYVPAQEKNFTTAPAICHDGKAHFPREGVFVSNGTHWFVT
QRNFYEPQIITTDNTFVSGNCDVVIGIVNNTVYDPLQPELDSFKEELDKYFKNHTSPDVDLGDIS
GINASVVNIQKEIDRLNEVAKNLNESLIDLQELGKYEQYIKWPWYIWLGFIAGLIAIVMVTIMLC
CMTSCCSCLKGCCSCGSCCKFDEDDSEPVLKGVKLHYT
SEQ ID NO 228: SEQ ID NO 1 + A892P
MFVFLVLLPLVSSQCVNLTTRTQLPPAYTNSFTRGVYYPDKVFRSSVLHSTQDLFLPFFSNVTWF
HAIHVSGTNGTKRFDNPVLPFNDGVYFASTEKSNIIRGWIFGTTLDSKTQSLLIVNNATNVVIKV
CEFQFCNDPFLGVYYHKNNKSWMESEFRVYSSANNCTFEYVSQPFLMDLEGKQGNFKNLREFVFK
NIDGYFKIYSKHTPINLVRDLPQGFSALEPLVDLPIGINITRFQTLLALHRSYLTPGDSSSGWTA
GAAAYYVGYLQPRTFLLKYNENGTITDAVDCALDPLSETKCTLKSFTVEKGIYQTSNFRVQPTES
IVRFPNITNLCPFGEVFNATRFASVYAWNRKRISNCVADYSVLYNSASFSTFKCYGVSPTKLNDL
CFTNVYADSFVIRGDEVRQIAPGQTGKIADYNYKLPDDFTGCVIAWNSNNLDSKVGGNYNYLYRL
FRKSNLKPFERDISTEIYQAGSTPCNGVEGFNCYFPLQSYGFQPTNGVGYQPYRVVVLSFELLHA
PATVCGPKKSTNLVKNKCVNFNFNGLTGTGVLTESNKKFLPFQQFGRDIADTTDAVRDPQTLEIL
DITPCSFGGVSVITPGTNTSNQVAVLYQDVNCTEVPVAIHADQLTPTWRVYSTGSNVFQTRAGCL
IGAEHVNNSYECDIPIGAGICASYQTQTNSPRRARSVASQSIIAYTMSLGAENSVAYSNNSIAIP
TNFTISVTTEILPVSMTKTSVDCTMYICGDSTECSNLLLQYGSFCTQLNRALTGIAVEQDKNTQE
VFAQVKQIYKTPPIKDFGGFNFSQILPDPSKPSKRSFIEDLLFNKVTLADAGFIKQYGDCLGDIA
ARDLICAQKFNGLTVLPPLLTDEMIAQYTSALLAGTITSGWTFGAGPALQIPFAMQMAYRFNGIG
VTQNVLYENQKLIANQFNSAIGKIQDSLSSTASALGKLQDVVNQNAQALNTLVKQLSSNFGAISS
VLNDILSRLDKVEAEVQIDRLITGRLQSLQTYVTQQLIRAAEIRASANLAATKMSECVLGQSKRV
DFCGKGYHLMSFPQSAPHGVVFLHVTYVPAQEKNFTTAPAICHDGKAHFPREGVFVSNGTHWFVT
QRNFYEPQIITTDNTFVSGNCDVVIGIVNNTVYDPLQPELDSFKEELDKYFKNHTSPDVDLGDIS
GINASVVNIQKEIDRLNEVAKNLNESLIDLQELGKYEQYIKWPWYIWLGFIAGLIAIVMVTIMLC
CMTSCCSCLKGCCSCGSCCKFDEDDSEPVLKGVKLHYT
SEQ ID NO 229: SEQ ID NO 1 + D614N
MFVFLVLLPLVSSQCVNLTTRTQLPPAYTNSFTRGVYYPDKVFRSSVLHSTQDLFLPFFSNVTWF
HAIHVSGTNGTKRFDNPVLPFNDGVYFASTEKSNIIRGWIFGTTLDSKTQSLLIVNNATNVVIKV
CEFQFCNDPFLGVYYHKNNKSWMESEFRVYSSANNCTFEYVSQPFLMDLEGKQGNFKNLREFVFK
NIDGYFKIYSKHTPINLVRDLPQGFSALEPLVDLPIGINITRFQTLLALHRSYLTPGDSSSGWTA
GAAAYYVGYLQPRTFLLKYNENGTITDAVDCALDPLSETKCTLKSFTVEKGIYQTSNFRVQPTES
IVRFPNITNLCPFGEVFNATRFASVYAWNRKRISNCVADYSVLYNSASFSTFKCYGVSPTKLNDL
CFTNVYADSFVIRGDEVRQIAPGQTGKIADYNYKLPDDFTGCVIAWNSNNLDSKVGGNYNYLYRL
FRKSNLKPFERDISTEIYQAGSTPCNGVEGFNCYFPLQSYGFQPTNGVGYQPYRVVVLSFELLHA
PATVCGPKKSTNLVKNKCVNFNFNGLTGTGVLTESNKKFLPFQQFGRDIADTTDAVRDPQTLEIL
DITPCSFGGVSVITPGTNTSNQVAVLYQNVNCTEVPVAIHADQLTPTWRVYSTGSNVFQTRAGCL
IGAEHVNNSYECDIPIGAGICASYQTQTNSPRRARSVASQSIIAYTMSLGAENSVAYSNNSIAIP
TNFTISVTTEILPVSMTKTSVDCTMYICGDSTECSNLLLQYGSFCTQLNRALTGIAVEQDKNTQE
VFAQVKQIYKTPPIKDFGGFNFSQILPDPSKPSKRSFIEDLLFNKVTLADAGFIKQYGDCLGDIA
ARDLICAQKFNGLTVLPPLLTDEMIAQYTSALLAGTITSGWTFGAGAALQIPFAMQMAYRFNGIG
VTQNVLYENQKLIANQFNSAIGKIQDSLSSTASALGKLQDVVNQNAQALNTLVKQLSSNFGAISS
VLNDILSRLDKVEAEVQIDRLITGRLQSLQTYVTQQLIRAAEIRASANLAATKMSECVLGQSKRV
DFCGKGYHLMSFPQSAPHGVVFLHVTYVPAQEKNFTTAPAICHDGKAHFPREGVFVSNGTHWFVT
QRNFYEPQIITTDNTFVSGNCDVVIGIVNNTVYDPLQPELDSFKEELDKYFKNHTSPDVDLGDIS
GINASVVNIQKEIDRLNEVAKNLNESLIDLQELGKYEQYIKWPWYIWLGFIAGLIAIVMVTIMLC
CMTSCCSCLKGCCSCGSCCKFDEDDSEPVLKGVKLHYT
SEQ ID NO 230: SEQ ID NO 1 + T572I
MFVFLVLLPLVSSQCVNLTTRTQLPPAYTNSFTRGVYYPDKVFRSSVLHSTQDLFLPFFSNVTWF
HAIHVSGTNGTKRFDNPVLPFNDGVYFASTEKSNIIRGWIFGTTLDSKTQSLLIVNNATNVVIKV
CEFQFCNDPFLGVYYHKNNKSWMESEFRVYSSANNCTFEYVSQPFLMDLEGKQGNFKNLREFVFK
NIDGYFKIYSKHTPINLVRDLPQGFSALEPLVDLPIGINITRFQTLLALHRSYLTPGDSSSGWTA
GAAAYYVGYLQPRTFLLKYNENGTITDAVDCALDPLSETKCTLKSFTVEKGIYQTSNFRVQPTES
IVRFPNITNLCPFGEVFNATRFASVYAWNRKRISNCVADYSVLYNSASFSTFKCYGVSPTKLNDL
CFTNVYADSFVIRGDEVRQIAPGQTGKIADYNYKLPDDFTGCVIAWNSNNLDSKVGGNYNYLYRL
FRKSNLKPFERDISTEIYQAGSTPCNGVEGFNCYFPLQSYGFQPTNGVGYQPYRVVVLSFELLHA
PATVCGPKKSTNLVKNKCVNFNFNGLTGTGVLTESNKKFLPFQQFGRDIADITDAVRDPQTLEIL
DITPCSFGGVSVITPGTNTSNQVAVLYQDVNCTEVPVAIHADQLTPTWRVYSTGSNVFQTRAGCL
IGAEHVNNSYECDIPIGAGICASYQTQTNSPRRARSVASQSIIAYTMSLGAENSVAYSNNSIAIP
TNFTISVTTEILPVSMTKTSVDCTMYICGDSTECSNLLLQYGSFCTQLNRALTGIAVEQDKNTQE
VFAQVKQIYKTPPIKDFGGFNFSQILPDPSKPSKRSFIEDLLFNKVTLADAGFIKQYGDCLGDIA
ARDLICAQKFNGLTVLPPLLTDEMIAQYTSALLAGTITSGWTFGAGAALQIPFAMQMAYRFNGIG
VTQNVLYENQKLIANQFNSAIGKIQDSLSSTASALGKLQDVVNQNAQALNTLVKQLSSNFGAISS
VLNDILSRLDKVEAEVQIDRLITGRLQSLQTYVTQQLIRAAEIRASANLAATKMSECVLGQSKRV
DFCGKGYHLMSFPQSAPHGVVFLHVTYVPAQEKNFTTAPAICHDGKAHFPREGVFVSNGTHWFVT
QRNFYEPQIITTDNTFVSGNCDVVIGIVNNTVYDPLQPELDSFKEELDKYFKNHTSPDVDLGDIS
GINASVVNIQKEIDRLNEVAKNLNESLIDLQELGKYEQYIKWPWYIWLGFIAGLIAIVMVTIMLC
CMTSCCSCLKGCCSCGSCCKFDEDDSEPVLKGVKLHYT
SEQ ID NO 231: SEQ ID NO 1 + N532P
MFVFLVLLPLVSSQCVNLTTRTQLPPAYTNSFTRGVYYPDKVFRSSVLHSTQDLFLPFFSNVTWF
HAIHVSGTNGTKRFDNPVLPFNDGVYFASTEKSNIIRGWIFGTTLDSKTQSLLIVNNATNVVIKV
CEFQFCNDPFLGVYYHKNNKSWMESEFRVYSSANNCTFEYVSQPFLMDLEGKQGNFKNLREFVFK
NIDGYFKIYSKHTPINLVRDLPQGFSALEPLVDLPIGINITRFQTLLALHRSYLTPGDSSSGWTA
GAAAYYVGYLQPRTFLLKYNENGTITDAVDCALDPLSETKCTLKSFTVEKGIYQTSNFRVQPTES
IVRFPNITNLCPFGEVFNATRFASVYAWNRKRISNCVADYSVLYNSASFSTFKCYGVSPTKLNDL
CFTNVYADSFVIRGDEVRQIAPGQTGKIADYNYKLPDDFTGCVIAWNSNNLDSKVGGNYNYLYRL
FRKSNLKPFERDISTEIYQAGSTPCNGVEGFNCYFPLQSYGFQPTNGVGYQPYRVVVLSFELLHA
PATVCGPKKSTPLVKNKCVNFNFNGLTGTGVLTESNKKFLPFQQFGRDIADTTDAVRDPQTLEIL
DITPCSFGGVSVITPGTNTSNQVAVLYQDVNCTEVPVAIHADQLTPTWRVYSTGSNVFQTRAGCL
IGAEHVNNSYECDIPIGAGICASYQTQTNSPRRARSVASQSIIAYTMSLGAENSVAYSNNSIAIP
TNFTISVTTEILPVSMTKTSVDCTMYICGDSTECSNLLLQYGSFCTQLNRALTGIAVEQDKNTQE
VFAQVKQIYKTPPIKDFGGFNFSQILPDPSKPSKRSFIEDLLFNKVTLADAGFIKQYGDCLGDIA
ARDLICAQKFNGLTVLPPLLTDEMIAQYTSALLAGTITSGWTFGAGAALQIPFAMQMAYRFNGIG
VTQNVLYENQKLIANQFNSAIGKIQDSLSSTASALGKLQDVVNQNAQALNTLVKQLSSNFGAISS
VLNDILSRLDKVEAEVQIDRLITGRLQSLQTYVTQQLIRAAEIRASANLAATKMSECVLGQSKRV
DFCGKGYHLMSFPQSAPHGVVFLHVTYVPAQEKNFTTAPAICHDGKAHFPREGVFVSNGTHWFVT
QRNFYEPQIITTDNTFVSGNCDVVIGIVNNTVYDPLQPELDSFKEELDKYFKNHTSPDVDLGDIS
GINASVVNIQKEIDRLNEVAKNLNESLIDLQELGKYEQYIKWPWYIWLGFIAGLIAIVMVTIMLC
CMTSCCSCLKGCCSCGSCCKFDEDDSEPVLKGVKLHYT
SEQ ID NO 232: SEQ ID NO 1 + G880C + F888C
MFVFLVLLPLVSSQCVNLTTRTQLPPAYTNSFTRGVYYPDKVFRSSVLHSTQDLFLPFFSNVTWF
HAIHVSGTNGTKRFDNPVLPFNDGVYFASTEKSNIIRGWIFGTTLDSKTQSLLIVNNATNVVIKV
CEFQFCNDPFLGVYYHKNNKSWMESEFRVYSSANNCTFEYVSQPFLMDLEGKQGNFKNLREFVFK
NIDGYFKIYSKHTPINLVRDLPQGFSALEPLVDLPIGINITRFQTLLALHRSYLTPGDSSSGWTA
GAAAYYVGYLQPRTFLLKYNENGTITDAVDCALDPLSETKCTLKSFTVEKGIYQTSNFRVQPTES
IVRFPNITNLCPFGEVFNATRFASVYAWNRKRISNCVADYSVLYNSASFSTFKCYGVSPTKLNDL
CFTNVYADSFVIRGDEVRQIAPGQTGKIADYNYKLPDDFTGCVIAWNSNNLDSKVGGNYNYLYRL
FRKSNLKPFERDISTEIYQAGSTPCNGVEGFNCYFPLQSYGFQPTNGVGYQPYRVVVLSFELLHA
PATVCGPKKSTNLVKNKCVNFNFNGLTGTGVLTESNKKFLPFQQFGRDIADTTDAVRDPQTLEIL
DITPCSFGGVSVITPGTNTSNQVAVLYQDVNCTEVPVAIHADQLTPTWRVYSTGSNVFQTRAGCL
IGAEHVNNSYECDIPIGAGICASYQTQTNSPRRARSVASQSIIAYTMSLGAENSVAYSNNSIAIP
TNFTISVTTEILPVSMTKTSVDCTMYICGDSTECSNLLLQYGSFCTQLNRALTGIAVEQDKNTQE
VFAQVKQIYKTPPIKDFGGFNFSQILPDPSKPSKRSFIEDLLFNKVTLADAGFIKQYGDCLGDIA
ARDLICAQKFNGLTVLPPLLTDEMIAQYTSALLACTITSGWTCGAGAALQIPFAMQMAYRFNGIG
VTQNVLYENQKLIANQFNSAIGKIQDSLSSTASALGKLQDVVNQNAQALNTLVKQLSSNFGAISS
VLNDILSRLDKVEAEVQIDRLITGRLQSLQTYVTQQLIRAAEIRASANLAATKMSECVLGQSKRV
DFCGKGYHLMSFPQSAPHGVVFLHVTYVPAQEKNFTTAPAICHDGKAHFPREGVFVSNGTHWFVT
QRNFYEPQIITTDNTFVSGNCDVVIGIVNNTVYDPLQPELDSFKEELDKYFKNHTSPDVDLGDIS
GINASVVNIQKEIDRLNEVAKNLNESLIDLQELGKYEQYIKWPWYIWLGFIAGLIAIVMVTIMLC
CMTSCCSCLKGCCSCGSCCKFDEDDSEPVLKGVKLHYT
SEQ ID NO 233: SEQ ID NO 1 + S884C + A893C
MFVFLVLLPLVSSQCVNLTTRTQLPPAYTNSFTRGVYYPDKVFRSSVLHSTQDLFLPFFSNVTWF
HAIHVSGTNGTKRFDNPVLPFNDGVYFASTEKSNIIRGWIFGTTLDSKTQSLLIVNNATNVVIKV
CEFQFCNDPFLGVYYHKNNKSWMESEFRVYSSANNCTFEYVSQPFLMDLEGKQGNFKNLREFVFK
NIDGYFKIYSKHTPINLVRDLPQGFSALEPLVDLPIGINITRFQTLLALHRSYLTPGDSSSGWTA
GAAAYYVGYLQPRTFLLKYNENGTITDAVDCALDPLSETKCTLKSFTVEKGIYQTSNFRVQPTES
IVRFPNITNLCPFGEVFNATRFASVYAWNRKRISNCVADYSVLYNSASFSTFKCYGVSPTKLNDL
CFTNVYADSFVIRGDEVRQIAPGQTGKIADYNYKLPDDFTGCVIAWNSNNLDSKVGGNYNYLYRL
FRKSNLKPFERDISTEIYQAGSTPCNGVEGFNCYFPLQSYGFQPTNGVGYQPYRVVVLSFELLHA
PATVCGPKKSTNLVKNKCVNFNFNGLTGTGVLTESNKKFLPFQQFGRDIADTTDAVRDPQTLEIL
DITPCSFGGVSVITPGTNTSNQVAVLYQDVNCTEVPVAIHADQLTPTWRVYSTGSNVFQTRAGCL
IGAEHVNNSYECDIPIGAGICASYQTQTNSPRRARSVASQSIIAYTMSLGAENSVAYSNNSIAIP
TNFTISVTTEILPVSMTKTSVDCTMYICGDSTECSNLLLQYGSFCTQLNRALTGIAVEQDKNTQE
VFAQVKQIYKTPPIKDFGGFNFSQILPDPSKPSKRSFIEDLLFNKVTLADAGFIKQYGDCLGDIA
ARDLICAQKFNGLTVLPPLLTDEMIAQYTSALLAGTITCGWTFGAGACLQIPFAMQMAYRFNGIG
VTQNVLYENQKLIANQFNSAIGKIQDSLSSTASALGKLQDVVNQNAQALNTLVKQLSSNFGAISS
VLNDILSRLDKVEAEVQIDRLITGRLQSLQTYVTQQLIRAAEIRASANLAATKMSECVLGQSKRV
DFCGKGYHLMSFPQSAPHGVVFLHVTYVPAQEKNFTTAPAICHDGKAHFPREGVFVSNGTHWFVT
QRNFYEPQIITTDNTFVSGNCDVVIGIVNNTVYDPLQPELDSFKEELDKYFKNHTSPDVDLGDIS
GINASVVNIQKEIDRLNEVAKNLNESLIDLQELGKYEQYIKWPWYIWLGFIAGLIAIVMVTIMLC
CMTSCCSCLKGCCSCGSCCKFDEDDSEPVLKGVKLHYT
SEQ ID NO 234: SEQ ID NO 1 + A942P + A892P
MFVFLVLLPLVSSQCVNLTTRTQLPPAYTNSFTRGVYYPDKVFRSSVLHSTQDLFLPFFSNVTWF
HAIHVSGTNGTKRFDNPVLPFNDGVYFASTEKSNIIRGWIFGTTLDSKTQSLLIVNNATNVVIKV
CEFQFCNDPFLGVYYHKNNKSWMESEFRVYSSANNCTFEYVSQPFLMDLEGKQGNFKNLREFVFK
NIDGYFKIYSKHTPINLVRDLPQGFSALEPLVDLPIGINITRFQTLLALHRSYLTPGDSSSGWTA
GAAAYYVGYLQPRTFLLKYNENGTITDAVDCALDPLSETKCTLKSFTVEKGIYQTSNFRVQPTES
IVRFPNITNLCPFGEVFNATRFASVYAWNRKRISNCVADYSVLYNSASFSTFKCYGVSPTKLNDL
CFTNVYADSFVIRGDEVRQIAPGQTGKIADYNYKLPDDFTGCVIAWNSNNLDSKVGGNYNYLYRL
FRKSNLKPFERDISTEIYQAGSTPCNGVEGFNCYFPLQSYGFQPTNGVGYQPYRVVVLSFELLHA
PATVCGPKKSTNLVKNKCVNFNFNGLTGTGVLTESNKKFLPFQQFGRDIADTTDAVRDPQTLEIL
DITPCSFGGVSVITPGTNTSNQVAVLYQDVNCTEVPVAIHADQLTPTWRVYSTGSNVFQTRAGCL
IGAEHVNNSYECDIPIGAGICASYQTQTNSPRRARSVASQSIIAYTMSLGAENSVAYSNNSIAIP
TNFTISVTTEILPVSMTKTSVDCTMYICGDSTECSNLLLQYGSFCTQLNRALTGIAVEQDKNTQE
VFAQVKQIYKTPPIKDFGGFNFSQILPDPSKPSKRSFIEDLLFNKVTLADAGFIKQYGDCLGDIA
ARDLICAQKFNGLTVLPPLLTDEMIAQYTSALLAGTITSGWTFGAGPALQIPFAMQMAYRFNGIG
VTQNVLYENQKLIANQFNSAIGKIQDSLSSTPSALGKLQDVVNQNAQALNTLVKQLSSNFGAISS
VLNDILSRLDKVEAEVQIDRLITGRLQSLQTYVTQQLIRAAEIRASANLAATKMSECVLGQSKRV
DFCGKGYHLMSFPQSAPHGVVFLHVTYVPAQEKNFTTAPAICHDGKAHFPREGVFVSNGTHWFVT
QRNFYEPQIITTDNTFVSGNCDVVIGIVNNTVYDPLQPELDSFKEELDKYFKNHTSPDVDLGDIS
GINASVVNIQKEIDRLNEVAKNLNESLIDLQELGKYEQYIKWPWYIWLGFIAGLIAIVMVTIMLC
CMTSCCSCLKGCCSCGSCCKFDEDDSEPVLKGVKLHYT
SEQ ID NO 235: SEQ ID NO 1 + A942P + D614N
MFVFLVLLPLVSSQCVNLTTRTQLPPAYTNSFTRGVYYPDKVFRSSVLHSTQDLFLPFFSNVTWF
HAIHVSGTNGTKRFDNPVLPFNDGVYFASTEKSNIIRGWIFGTTLDSKTQSLLIVNNATNVVIKV
CEFQFCNDPFLGVYYHKNNKSWMESEFRVYSSANNCTFEYVSQPFLMDLEGKQGNFKNLREFVFK
NIDGYFKIYSKHTPINLVRDLPQGFSALEPLVDLPIGINITRFQTLLALHRSYLTPGDSSSGWTA
GAAAYYVGYLQPRTFLLKYNENGTITDAVDCALDPLSETKCTLKSFTVEKGIYQTSNFRVQPTES
IVRFPNITNLCPFGEVFNATRFASVYAWNRKRISNCVADYSVLYNSASFSTFKCYGVSPTKLNDL
CFTNVYADSFVIRGDEVRQIAPGQTGKIADYNYKLPDDFTGCVIAWNSNNLDSKVGGNYNYLYRL
FRKSNLKPFERDISTEIYQAGSTPCNGVEGFNCYFPLQSYGFQPTNGVGYQPYRVVVLSFELLHA
PATVCGPKKSTNLVKNKCVNFNFNGLTGTGVLTESNKKFLPFQQFGRDIADTTDAVRDPQTLEIL
DITPCSFGGVSVITPGTNTSNQVAVLYQNVNCTEVPVAIHADQLTPTWRVYSTGSNVFQTRAGCL
IGAEHVNNSYECDIPIGAGICASYQTQTNSPRRARSVASQSIIAYTMSLGAENSVAYSNNSIAIP
TNFTISVTTEILPVSMTKTSVDCTMYICGDSTECSNLLLQYGSFCTQLNRALTGIAVEQDKNTQE
VFAQVKQIYKTPPIKDFGGFNFSQILPDPSKPSKRSFIEDLLFNKVTLADAGFIKQYGDCLGDIA
ARDLICAQKFNGLTVLPPLLTDEMIAQYTSALLAGTITSGWTFGAGAALQIPFAMQMAYRFNGIG
VTQNVLYENQKLIANQFNSAIGKIQDSLSSTPSALGKLQDVVNQNAQALNTLVKQLSSNFGAISS
VLNDILSRLDKVEAEVQIDRLITGRLQSLQTYVTQQLIRAAEIRASANLAATKMSECVLGQSKRV
DFCGKGYHLMSFPQSAPHGVVFLHVTYVPAQEKNFTTAPAICHDGKAHFPREGVFVSNGTHWFVT
QRNFYEPQIITTDNTFVSGNCDVVIGIVNNTVYDPLQPELDSFKEELDKYFKNHTSPDVDLGDIS
GINASVVNIQKEIDRLNEVAKNLNESLIDLQELGKYEQYIKWPWYIWLGFIAGLIAIVMVTIMLC
CMTSCCSCLKGCCSCGSCCKFDEDDSEPVLKGVKLHYT
SEQ ID NO 236: SEQ ID NO 1 + A942P + T572I
MFVFLVLLPLVSSQCVNLTTRTQLPPAYTNSFTRGVYYPDKVFRSSVLHSTQDLFLPFFSNVTWF
HAIHVSGTNGTKRFDNPVLPFNDGVYFASTEKSNIIRGWIFGTTLDSKTQSLLIVNNATNVVIKV
CEFQFCNDPFLGVYYHKNNKSWMESEFRVYSSANNCTFEYVSQPFLMDLEGKQGNFKNLREFVFK
NIDGYFKIYSKHTPINLVRDLPQGFSALEPLVDLPIGINITRFQTLLALHRSYLTPGDSSSGWTA
GAAAYYVGYLQPRTFLLKYNENGTITDAVDCALDPLSETKCTLKSFTVEKGIYQTSNFRVQPTES
IVRFPNITNLCPFGEVFNATRFASVYAWNRKRISNCVADYSVLYNSASFSTFKCYGVSPTKLNDL
CFTNVYADSFVIRGDEVRQIAPGQTGKIADYNYKLPDDFTGCVIAWNSNNLDSKVGGNYNYLYRL
FRKSNLKPFERDISTEIYQAGSTPCNGVEGFNCYFPLQSYGFQPTNGVGYQPYRVVVLSFELLHA
PATVCGPKKSTNLVKNKCVNFNFNGLTGTGVLTESNKKFLPFQQFGRDIADITDAVRDPQTLEIL
DITPCSFGGVSVITPGTNTSNQVAVLYQDVNCTEVPVAIHADQLTPTWRVYSTGSNVFQTRAGCL
IGAEHVNNSYECDIPIGAGICASYQTQTNSPRRARSVASQSIIAYTMSLGAENSVAYSNNSIAIP
TNFTISVTTEILPVSMTKTSVDCTMYICGDSTECSNLLLQYGSFCTQLNRALTGIAVEQDKNTQE
VFAQVKQIYKTPPIKDFGGFNFSQILPDPSKPSKRSFIEDLLFNKVTLADAGFIKQYGDCLGDIA
ARDLICAQKFNGLTVLPPLLTDEMIAQYTSALLAGTITSGWTFGAGAALQIPFAMQMAYRFNGIG
VTQNVLYENQKLIANQFNSAIGKIQDSLSSTPSALGKLQDVVNQNAQALNTLVKQLSSNFGAISS
VLNDILSRLDKVEAEVQIDRLITGRLQSLQTYVTQQLIRAAEIRASANLAATKMSECVLGQSKRV
DFCGKGYHLMSFPQSAPHGVVFLHVTYVPAQEKNFTTAPAICHDGKAHFPREGVFVSNGTHWFVT
QRNFYEPQIITTDNTFVSGNCDVVIGIVNNTVYDPLQPELDSFKEELDKYFKNHTSPDVDLGDIS
GINASVVNIQKEIDRLNEVAKNLNESLIDLQELGKYEQYIKWPWYIWLGFIAGLIAIVMVTIMLC
CMTSCCSCLKGCCSCGSCCKFDEDDSEPVLKGVKLHYT
SEQ ID NO 237: SEQ ID NO 1 + A942P + N532P
MFVFLVLLPLVSSQCVNLTTRTQLPPAYTNSFTRGVYYPDKVFRSSVLHSTQDLFLPFFSNVTWF
HAIHVSGTNGTKRFDNPVLPFNDGVYFASTEKSNIIRGWIFGTTLDSKTQSLLIVNNATNVVIKV
CEFQFCNDPFLGVYYHKNNKSWMESEFRVYSSANNCTFEYVSQPFLMDLEGKQGNFKNLREFVFK
NIDGYFKIYSKHTPINLVRDLPQGFSALEPLVDLPIGINITRFQTLLALHRSYLTPGDSSSGWTA
GAAAYYVGYLQPRTFLLKYNENGTITDAVDCALDPLSETKCTLKSFTVEKGIYQTSNFRVQPTES
IVRFPNITNLCPFGEVFNATRFASVYAWNRKRISNCVADYSVLYNSASFSTFKCYGVSPTKLNDL
CFTNVYADSFVIRGDEVRQIAPGQTGKIADYNYKLPDDFTGCVIAWNSNNLDSKVGGNYNYLYRL
FRKSNLKPFERDISTEIYQAGSTPCNGVEGFNCYFPLQSYGFQPTNGVGYQPYRVVVLSFELLHA
PATVCGPKKSTPLVKNKCVNFNFNGLTGTGVLTESNKKFLPFQQFGRDIADTTDAVRDPQTLEIL
DITPCSFGGVSVITPGTNTSNQVAVLYQDVNCTEVPVAIHADQLTPTWRVYSTGSNVFQTRAGCL
IGAEHVNNSYECDIPIGAGICASYQTQTNSPRRARSVASQSIIAYTMSLGAENSVAYSNNSIAIP
TNFTISVTTEILPVSMTKTSVDCTMYICGDSTECSNLLLQYGSFCTQLNRALTGIAVEQDKNTQE
VFAQVKQIYKTPPIKDFGGFNFSQILPDPSKPSKRSFIEDLLFNKVTLADAGFIKQYGDCLGDIA
ARDLICAQKFNGLTVLPPLLTDEMIAQYTSALLAGTITSGWTFGAGAALQIPFAMQMAYRFNGIG
VTQNVLYENQKLIANQFNSAIGKIQDSLSSTPSALGKLQDVVNQNAQALNTLVKQLSSNFGAISS
VLNDILSRLDKVEAEVQIDRLITGRLQSLQTYVTQQLIRAAEIRASANLAATKMSECVLGQSKRV
DFCGKGYHLMSFPQSAPHGVVFLHVTYVPAQEKNFTTAPAICHDGKAHFPREGVFVSNGTHWFVT
QRNFYEPQIITTDNTFVSGNCDVVIGIVNNTVYDPLQPELDSFKEELDKYFKNHTSPDVDLGDIS
GINASVVNIQKEIDRLNEVAKNLNESLIDLQELGKYEQYIKWPWYIWLGFIAGLIAIVMVTIMLC
CMTSCCSCLKGCCSCGSCCKFDEDDSEPVLKGVKLHYT
SEQ ID NO 238: SEQ ID NO 1 + A942P + G880C + F888C
MFVFLVLLPLVSSQCVNLTTRTQLPPAYTNSFTRGVYYPDKVFRSSVLHSTQDLFLPFFSNVTWF
HAIHVSGTNGTKRFDNPVLPFNDGVYFASTEKSNIIRGWIFGTTLDSKTQSLLIVNNATNVVIKV
CEFQFCNDPFLGVYYHKNNKSWMESEFRVYSSANNCTFEYVSQPFLMDLEGKQGNFKNLREFVFK
NIDGYFKIYSKHTPINLVRDLPQGFSALEPLVDLPIGINITRFQTLLALHRSYLTPGDSSSGWTA
GAAAYYVGYLQPRTFLLKYNENGTITDAVDCALDPLSETKCTLKSFTVEKGIYQTSNFRVQPTES
IVRFPNITNLCPFGEVFNATRFASVYAWNRKRISNCVADYSVLYNSASFSTFKCYGVSPTKLNDL
CFTNVYADSFVIRGDEVRQIAPGQTGKIADYNYKLPDDFTGCVIAWNSNNLDSKVGGNYNYLYRL
FRKSNLKPFERDISTEIYQAGSTPCNGVEGFNCYFPLQSYGFQPTNGVGYQPYRVVVLSFELLHA
PATVCGPKKSTNLVKNKCVNFNFNGLTGTGVLTESNKKFLPFQQFGRDIADTTDAVRDPQTLEIL
DITPCSFGGVSVITPGTNTSNQVAVLYQDVNCTEVPVAIHADQLTPTWRVYSTGSNVFQTRAGCL
IGAEHVNNSYECDIPIGAGICASYQTQTNSPRRARSVASQSIIAYTMSLGAENSVAYSNNSIAIP
TNFTISVTTEILPVSMTKTSVDCTMYICGDSTECSNLLLQYGSFCTQLNRALTGIAVEQDKNTQE
VFAQVKQIYKTPPIKDFGGFNFSQILPDPSKPSKRSFIEDLLFNKVTLADAGFIKQYGDCLGDIA
ARDLICAQKFNGLTVLPPLLTDEMIAQYTSALLACTITSGWTCGAGAALQIPFAMQMAYRFNGIG
VTQNVLYENQKLIANQFNSAIGKIQDSLSSTPSALGKLQDVVNQNAQALNTLVKQLSSNFGAISS
VLNDILSRLDKVEAEVQIDRLITGRLQSLQTYVTQQLIRAAEIRASANLAATKMSECVLGQSKRV
DFCGKGYHLMSFPQSAPHGVVFLHVTYVPAQEKNFTTAPAICHDGKAHFPREGVFVSNGTHWFVT
QRNFYEPQIITTDNTFVSGNCDVVIGIVNNTVYDPLQPELDSFKEELDKYFKNHTSPDVDLGDIS
GINASVVNIQKEIDRLNEVAKNLNESLIDLQELGKYEQYIKWPWYIWLGFIAGLIAIVMVTIMLC
CMTSCCSCLKGCCSCGSCCKFDEDDSEPVLKGVKLHYT
SEQ ID NO 239: SEQ ID NO 1 + A942P + S884C + A893C
MFVFLVLLPLVSSQCVNLTTRTQLPPAYTNSFTRGVYYPDKVFRSSVLHSTQDLFLPFFSNVTWF
HAIHVSGTNGTKRFDNPVLPFNDGVYFASTEKSNIIRGWIFGTTLDSKTQSLLIVNNATNVVIKV
CEFQFCNDPFLGVYYHKNNKSWMESEFRVYSSANNCTFEYVSQPFLMDLEGKQGNFKNLREFVFK
NIDGYFKIYSKHTPINLVRDLPQGFSALEPLVDLPIGINITRFQTLLALHRSYLTPGDSSSGWTA
GAAAYYVGYLQPRTFLLKYNENGTITDAVDCALDPLSETKCTLKSFTVEKGIYQTSNFRVQPTES
IVRFPNITNLCPFGEVFNATRFASVYAWNRKRISNCVADYSVLYNSASFSTFKCYGVSPTKLNDL
CFTNVYADSFVIRGDEVRQIAPGQTGKIADYNYKLPDDFTGCVIAWNSNNLDSKVGGNYNYLYRL
FRKSNLKPFERDISTEIYQAGSTPCNGVEGFNCYFPLQSYGFQPTNGVGYQPYRVVVLSFELLHA
PATVCGPKKSTNLVKNKCVNFNFNGLTGTGVLTESNKKFLPFQQFGRDIADTTDAVRDPQTLEIL
DITPCSFGGVSVITPGTNTSNQVAVLYQDVNCTEVPVAIHADQLTPTWRVYSTGSNVFQTRAGCL
IGAEHVNNSYECDIPIGAGICASYQTQTNSPRRARSVASQSIIAYTMSLGAENSVAYSNNSIAIP
TNFTISVTTEILPVSMTKTSVDCTMYICGDSTECSNLLLQYGSFCTQLNRALTGIAVEQDKNTQE
VFAQVKQIYKTPPIKDFGGFNFSQILPDPSKPSKRSFIEDLLFNKVTLADAGFIKQYGDCLGDIA
ARDLICAQKFNGLTVLPPLLTDEMIAQYTSALLAGTITCGWTFGAGACLQIPFAMQMAYRFNGIG
VTQNVLYENQKLIANQFNSAIGKIQDSLSSTPSALGKLQDVVNQNAQALNTLVKQLSSNFGAISS
VLNDILSRLDKVEAEVQIDRLITGRLQSLQTYVTQQLIRAAEIRASANLAATKMSECVLGQSKRV
DFCGKGYHLMSFPQSAPHGVVFLHVTYVPAQEKNFTTAPAICHDGKAHFPREGVFVSNGTHWFVT
QRNFYEPQIITTDNTFVSGNCDVVIGIVNNTVYDPLQPELDSFKEELDKYFKNHTSPDVDLGDIS
GINASVVNIQKEIDRLNEVAKNLNESLIDLQELGKYEQYIKWPWYIWLGFIAGLIAIVMVTIMLC
CMTSCCSCLKGCCSCGSCCKFDEDDSEPVLKGVKLHYT
SEQ ID NO 240: SEQ ID NO 1 + A892P + D614N
MFVFLVLLPLVSSQCVNLTTRTQLPPAYTNSFTRGVYYPDKVFRSSVLHSTQDLFLPFFSNVTWF
HAIHVSGTNGTKRFDNPVLPFNDGVYFASTEKSNIIRGWIFGTTLDSKTQSLLIVNNATNVVIKV
CEFQFCNDPFLGVYYHKNNKSWMESEFRVYSSANNCTFEYVSQPFLMDLEGKQGNFKNLREFVFK
NIDGYFKIYSKHTPINLVRDLPQGFSALEPLVDLPIGINITRFQTLLALHRSYLTPGDSSSGWTA
GAAAYYVGYLQPRTFLLKYNENGTITDAVDCALDPLSETKCTLKSFTVEKGIYQTSNFRVQPTES
IVRFPNITNLCPFGEVFNATRFASVYAWNRKRISNCVADYSVLYNSASFSTFKCYGVSPTKLNDL
CFTNVYADSFVIRGDEVRQIAPGQTGKIADYNYKLPDDFTGCVIAWNSNNLDSKVGGNYNYLYRL
FRKSNLKPFERDISTEIYQAGSTPCNGVEGFNCYFPLQSYGFQPTNGVGYQPYRVVVLSFELLHA
PATVCGPKKSTNLVKNKCVNFNFNGLTGTGVLTESNKKFLPFQQFGRDIADTTDAVRDPQTLEIL
DITPCSFGGVSVITPGTNTSNQVAVLYQNVNCTEVPVAIHADQLTPTWRVYSTGSNVFQTRAGCL
IGAEHVNNSYECDIPIGAGICASYQTQTNSPRRARSVASQSIIAYTMSLGAENSVAYSNNSIAIP
TNFTISVTTEILPVSMTKTSVDCTMYICGDSTECSNLLLQYGSFCTQLNRALTGIAVEQDKNTQE
VFAQVKQIYKTPPIKDFGGFNFSQILPDPSKPSKRSFIEDLLFNKVTLADAGFIKQYGDCLGDIA
ARDLICAQKFNGLTVLPPLLTDEMIAQYTSALLAGTITSGWTFGAGPALQIPFAMQMAYRFNGIG
VTQNVLYENQKLIANQFNSAIGKIQDSLSSTASALGKLQDVVNQNAQALNTLVKQLSSNFGAISS
VLNDILSRLDKVEAEVQIDRLITGRLQSLQTYVTQQLIRAAEIRASANLAATKMSECVLGQSKRV
DFCGKGYHLMSFPQSAPHGVVFLHVTYVPAQEKNFTTAPAICHDGKAHFPREGVFVSNGTHWFVT
QRNFYEPQIITTDNTFVSGNCDVVIGIVNNTVYDPLQPELDSFKEELDKYFKNHTSPDVDLGDIS
GINASVVNIQKEIDRLNEVAKNLNESLIDLQELGKYEQYIKWPWYIWLGFIAGLIAIVMVTIMLC
CMTSCCSCLKGCCSCGSCCKFDEDDSEPVLKGVKLHYT
SEQ ID NO 241: SEQ ID NO 1 + A892P + T572I
MFVFLVLLPLVSSQCVNLTTRTQLPPAYTNSFTRGVYYPDKVFRSSVLHSTQDLFLPFFSNVTWF
HAIHVSGTNGTKRFDNPVLPFNDGVYFASTEKSNIIRGWIFGTTLDSKTQSLLIVNNATNVVIKV
CEFQFCNDPFLGVYYHKNNKSWMESEFRVYSSANNCTFEYVSQPFLMDLEGKQGNFKNLREFVFK
NIDGYFKIYSKHTPINLVRDLPQGFSALEPLVDLPIGINITRFQTLLALHRSYLTPGDSSSGWTA
GAAAYYVGYLQPRTFLLKYNENGTITDAVDCALDPLSETKCTLKSFTVEKGIYQTSNFRVQPTES
IVRFPNITNLCPFGEVFNATRFASVYAWNRKRISNCVADYSVLYNSASFSTFKCYGVSPTKLNDL
CFTNVYADSFVIRGDEVRQIAPGQTGKIADYNYKLPDDFTGCVIAWNSNNLDSKVGGNYNYLYRL
FRKSNLKPFERDISTEIYQAGSTPCNGVEGFNCYFPLQSYGFQPTNGVGYQPYRVVVLSFELLHA
PATVCGPKKSTNLVKNKCVNFNFNGLTGTGVLTESNKKFLPFQQFGRDIADITDAVRDPQTLEIL
DITPCSFGGVSVITPGTNTSNQVAVLYQDVNCTEVPVAIHADQLTPTWRVYSTGSNVFQTRAGCL
IGAEHVNNSYECDIPIGAGICASYQTQTNSPRRARSVASQSIIAYTMSLGAENSVAYSNNSIAIP
TNFTISVTTEILPVSMTKTSVDCTMYICGDSTECSNLLLQYGSFCTQLNRALTGIAVEQDKNTQE
VFAQVKQIYKTPPIKDFGGFNFSQILPDPSKPSKRSFIEDLLFNKVTLADAGFIKQYGDCLGDIA
ARDLICAQKFNGLTVLPPLLTDEMIAQYTSALLAGTITSGWTFGAGPALQIPFAMQMAYRFNGIG
VTQNVLYENQKLIANQFNSAIGKIQDSLSSTASALGKLQDVVNQNAQALNTLVKQLSSNFGAISS
VLNDILSRLDKVEAEVQIDRLITGRLQSLQTYVTQQLIRAAEIRASANLAATKMSECVLGQSKRV
DFCGKGYHLMSFPQSAPHGVVFLHVTYVPAQEKNFTTAPAICHDGKAHFPREGVFVSNGTHWFVT
QRNFYEPQIITTDNTFVSGNCDVVIGIVNNTVYDPLQPELDSFKEELDKYFKNHTSPDVDLGDIS
GINASVVNIQKEIDRLNEVAKNLNESLIDLQELGKYEQYIKWPWYIWLGFIAGLIAIVMVTIMLC
CMTSCCSCLKGCCSCGSCCKFDEDDSEPVLKGVKLHYT
SEQ ID NO 242: SEQ ID NO 1 + A892P + N532P
MFVFLVLLPLVSSQCVNLTTRTQLPPAYTNSFTRGVYYPDKVFRSSVLHSTQDLFLPFFSNVTWF
HAIHVSGTNGTKRFDNPVLPFNDGVYFASTEKSNIIRGWIFGTTLDSKTQSLLIVNNATNVVIKV
CEFQFCNDPFLGVYYHKNNKSWMESEFRVYSSANNCTFEYVSQPFLMDLEGKQGNFKNLREFVFK
NIDGYFKIYSKHTPINLVRDLPQGFSALEPLVDLPIGINITRFQTLLALHRSYLTPGDSSSGWTA
GAAAYYVGYLQPRTFLLKYNENGTITDAVDCALDPLSETKCTLKSFTVEKGIYQTSNFRVQPTES
IVRFPNITNLCPFGEVFNATRFASVYAWNRKRISNCVADYSVLYNSASFSTFKCYGVSPTKLNDL
CFTNVYADSFVIRGDEVRQIAPGQTGKIADYNYKLPDDFTGCVIAWNSNNLDSKVGGNYNYLYRL
FRKSNLKPFERDISTEIYQAGSTPCNGVEGFNCYFPLQSYGFQPTNGVGYQPYRVVVLSFELLHA
PATVCGPKKSTPLVKNKCVNFNFNGLTGTGVLTESNKKFLPFQQFGRDIADTTDAVRDPQTLEIL
DITPCSFGGVSVITPGTNTSNQVAVLYQDVNCTEVPVAIHADQLTPTWRVYSTGSNVFQTRAGCL
IGAEHVNNSYECDIPIGAGICASYQTQTNSPRRARSVASQSIIAYTMSLGAENSVAYSNNSIAIP
TNFTISVTTEILPVSMTKTSVDCTMYICGDSTECSNLLLQYGSFCTQLNRALTGIAVEQDKNTQE
VFAQVKQIYKTPPIKDFGGFNFSQILPDPSKPSKRSFIEDLLFNKVTLADAGFIKQYGDCLGDIA
ARDLICAQKFNGLTVLPPLLTDEMIAQYTSALLAGTITSGWTFGAGPALQIPFAMQMAYRFNGIG
VTQNVLYENQKLIANQFNSAIGKIQDSLSSTASALGKLQDVVNQNAQALNTLVKQLSSNFGAISS
VLNDILSRLDKVEAEVQIDRLITGRLQSLQTYVTQQLIRAAEIRASANLAATKMSECVLGQSKRV
DFCGKGYHLMSFPQSAPHGVVFLHVTYVPAQEKNFTTAPAICHDGKAHFPREGVFVSNGTHWFVT
QRNFYEPQIITTDNTFVSGNCDVVIGIVNNTVYDPLQPELDSFKEELDKYFKNHTSPDVDLGDIS
GINASVVNIQKEIDRLNEVAKNLNESLIDLQELGKYEQYIKWPWYIWLGFIAGLIAIVMVTIMLC
CMTSCCSCLKGCCSCGSCCKFDEDDSEPVLKGVKLHYT
SEQ ID NO 243: SEQ ID NO 1 + A892P + G880C + F888C
MFVFLVLLPLVSSQCVNLTTRTQLPPAYTNSFTRGVYYPDKVFRSSVLHSTQDLFLPFFSNVTWF
HAIHVSGTNGTKRFDNPVLPFNDGVYFASTEKSNIIRGWIFGTTLDSKTQSLLIVNNATNVVIKV
CEFQFCNDPFLGVYYHKNNKSWMESEFRVYSSANNCTFEYVSQPFLMDLEGKQGNFKNLREFVFK
NIDGYFKIYSKHTPINLVRDLPQGFSALEPLVDLPIGINITRFQTLLALHRSYLTPGDSSSGWTA
GAAAYYVGYLQPRTFLLKYNENGTITDAVDCALDPLSETKCTLKSFTVEKGIYQTSNFRVQPTES
IVRFPNITNLCPFGEVFNATRFASVYAWNRKRISNCVADYSVLYNSASFSTFKCYGVSPTKLNDL
CFTNVYADSFVIRGDEVRQIAPGQTGKIADYNYKLPDDFTGCVIAWNSNNLDSKVGGNYNYLYRL
FRKSNLKPFERDISTEIYQAGSTPCNGVEGFNCYFPLQSYGFQPTNGVGYQPYRVVVLSFELLHA
PATVCGPKKSTNLVKNKCVNFNFNGLTGTGVLTESNKKFLPFQQFGRDIADTTDAVRDPQTLEIL
DITPCSFGGVSVITPGTNTSNQVAVLYQDVNCTEVPVAIHADQLTPTWRVYSTGSNVFQTRAGCL
IGAEHVNNSYECDIPIGAGICASYQTQTNSPRRARSVASQSIIAYTMSLGAENSVAYSNNSIAIP
TNFTISVTTEILPVSMTKTSVDCTMYICGDSTECSNLLLQYGSFCTQLNRALTGIAVEQDKNTQE
VFAQVKQIYKTPPIKDFGGFNFSQILPDPSKPSKRSFIEDLLFNKVTLADAGFIKQYGDCLGDIA
ARDLICAQKFNGLTVLPPLLTDEMIAQYTSALLACTITSGWTCGAGPALQIPFAMQMAYRFNGIG
VTQNVLYENQKLIANQFNSAIGKIQDSLSSTASALGKLQDVVNQNAQALNTLVKQLSSNFGAISS
VLNDILSRLDKVEAEVQIDRLITGRLQSLQTYVTQQLIRAAEIRASANLAATKMSECVLGQSKRV
DFCGKGYHLMSFPQSAPHGVVFLHVTYVPAQEKNFTTAPAICHDGKAHFPREGVFVSNGTHWFVT
QRNFYEPQIITTDNTFVSGNCDVVIGIVNNTVYDPLQPELDSFKEELDKYFKNHTSPDVDLGDIS
GINASVVNIQKEIDRLNEVAKNLNESLIDLQELGKYEQYIKWPWYIWLGFIAGLIAIVMVTIMLC
CMTSCCSCLKGCCSCGSCCKFDEDDSEPVLKGVKLHYT
SEQ ID NO 244: SEQ ID NO 1 + A892P + S884C + A893C
MFVFLVLLPLVSSQCVNLTTRTQLPPAYTNSFTRGVYYPDKVFRSSVLHSTQDLFLPFFSNVTWF
HAIHVSGTNGTKRFDNPVLPFNDGVYFASTEKSNIIRGWIFGTTLDSKTQSLLIVNNATNVVIKV
CEFQFCNDPFLGVYYHKNNKSWMESEFRVYSSANNCTFEYVSQPFLMDLEGKQGNFKNLREFVFK
NIDGYFKIYSKHTPINLVRDLPQGFSALEPLVDLPIGINITRFQTLLALHRSYLTPGDSSSGWTA
GAAAYYVGYLQPRTFLLKYNENGTITDAVDCALDPLSETKCTLKSFTVEKGIYQTSNFRVQPTES
IVRFPNITNLCPFGEVFNATRFASVYAWNRKRISNCVADYSVLYNSASFSTFKCYGVSPTKLNDL
CFTNVYADSFVIRGDEVRQIAPGQTGKIADYNYKLPDDFTGCVIAWNSNNLDSKVGGNYNYLYRL
FRKSNLKPFERDISTEIYQAGSTPCNGVEGFNCYFPLQSYGFQPTNGVGYQPYRVVVLSFELLHA
PATVCGPKKSTNLVKNKCVNFNFNGLTGTGVLTESNKKFLPFQQFGRDIADTTDAVRDPQTLEIL
DITPCSFGGVSVITPGTNTSNQVAVLYQDVNCTEVPVAIHADQLTPTWRVYSTGSNVFQTRAGCL
IGAEHVNNSYECDIPIGAGICASYQTQTNSPRRARSVASQSIIAYTMSLGAENSVAYSNNSIAIP
TNFTISVTTEILPVSMTKTSVDCTMYICGDSTECSNLLLQYGSFCTQLNRALTGIAVEQDKNTQE
VFAQVKQIYKTPPIKDFGGFNFSQILPDPSKPSKRSFIEDLLFNKVTLADAGFIKQYGDCLGDIA
ARDLICAQKFNGLTVLPPLLTDEMIAQYTSALLAGTITCGWTFGAGPCLQIPFAMQMAYRFNGIG
VTQNVLYENQKLIANQFNSAIGKIQDSLSSTASALGKLQDVVNQNAQALNTLVKQLSSNFGAISS
VLNDILSRLDKVEAEVQIDRLITGRLQSLQTYVTQQLIRAAEIRASANLAATKMSECVLGQSKRV
DFCGKGYHLMSFPQSAPHGVVFLHVTYVPAQEKNFTTAPAICHDGKAHFPREGVFVSNGTHWFVT
QRNFYEPQIITTDNTFVSGNCDVVIGIVNNTVYDPLQPELDSFKEELDKYFKNHTSPDVDLGDIS
GINASVVNIQKEIDRLNEVAKNLNESLIDLQELGKYEQYIKWPWYIWLGFIAGLIAIVMVTIMLC
CMTSCCSCLKGCCSCGSCCKFDEDDSEPVLKGVKLHYT
SEQ ID NO 245: SEQ ID NO 1 + D614N + T572I
MFVFLVLLPLVSSQCVNLTTRTQLPPAYTNSFTRGVYYPDKVFRSSVLHSTQDLFLPFFSNVTWF
HAIHVSGTNGTKRFDNPVLPFNDGVYFASTEKSNIIRGWIFGTTLDSKTQSLLIVNNATNVVIKV
CEFQFCNDPFLGVYYHKNNKSWMESEFRVYSSANNCTFEYVSQPFLMDLEGKQGNFKNLREFVFK
NIDGYFKIYSKHTPINLVRDLPQGFSALEPLVDLPIGINITRFQTLLALHRSYLTPGDSSSGWTA
GAAAYYVGYLQPRTFLLKYNENGTITDAVDCALDPLSETKCTLKSFTVEKGIYQTSNFRVQPTES
IVRFPNITNLCPFGEVFNATRFASVYAWNRKRISNCVADYSVLYNSASFSTFKCYGVSPTKLNDL
CFTNVYADSFVIRGDEVRQIAPGQTGKIADYNYKLPDDFTGCVIAWNSNNLDSKVGGNYNYLYRL
FRKSNLKPFERDISTEIYQAGSTPCNGVEGFNCYFPLQSYGFQPTNGVGYQPYRVVVLSFELLHA
PATVCGPKKSTNLVKNKCVNFNFNGLTGTGVLTESNKKFLPFQQFGRDIADITDAVRDPQTLEIL
DITPCSFGGVSVITPGTNTSNQVAVLYQNVNCTEVPVAIHADQLTPTWRVYSTGSNVFQTRAGCL
IGAEHVNNSYECDIPIGAGICASYQTQTNSPRRARSVASQSIIAYTMSLGAENSVAYSNNSIAIP
TNFTISVTTEILPVSMTKTSVDCTMYICGDSTECSNLLLQYGSFCTQLNRALTGIAVEQDKNTQE
VFAQVKQIYKTPPIKDFGGFNFSQILPDPSKPSKRSFIEDLLFNKVTLADAGFIKQYGDCLGDIA
ARDLICAQKFNGLTVLPPLLTDEMIAQYTSALLAGTITSGWTFGAGAALQIPFAMQMAYRFNGIG
VTQNVLYENQKLIANQFNSAIGKIQDSLSSTASALGKLQDVVNQNAQALNTLVKQLSSNFGAISS
VLNDILSRLDKVEAEVQIDRLITGRLQSLQTYVTQQLIRAAEIRASANLAATKMSECVLGQSKRV
DFCGKGYHLMSFPQSAPHGVVFLHVTYVPAQEKNFTTAPAICHDGKAHFPREGVFVSNGTHWFVT
QRNFYEPQIITTDNTFVSGNCDVVIGIVNNTVYDPLQPELDSFKEELDKYFKNHTSPDVDLGDIS
GINASVVNIQKEIDRLNEVAKNLNESLIDLQELGKYEQYIKWPWYIWLGFIAGLIAIVMVTIMLC
CMTSCCSCLKGCCSCGSCCKFDEDDSEPVLKGVKLHYT
SEQ ID NO 246: SEQ ID NO 1 + D614N + N532P
MFVFLVLLPLVSSQCVNLTTRTQLPPAYTNSFTRGVYYPDKVFRSSVLHSTQDLFLPFFSNVTWF
HAIHVSGTNGTKRFDNPVLPFNDGVYFASTEKSNIIRGWIFGTTLDSKTQSLLIVNNATNVVIKV
CEFQFCNDPFLGVYYHKNNKSWMESEFRVYSSANNCTFEYVSQPFLMDLEGKQGNFKNLREFVFK
NIDGYFKIYSKHTPINLVRDLPQGFSALEPLVDLPIGINITRFQTLLALHRSYLTPGDSSSGWTA
GAAAYYVGYLQPRTFLLKYNENGTITDAVDCALDPLSETKCTLKSFTVEKGIYQTSNFRVQPTES
IVRFPNITNLCPFGEVFNATRFASVYAWNRKRISNCVADYSVLYNSASFSTFKCYGVSPTKLNDL
CFTNVYADSFVIRGDEVRQIAPGQTGKIADYNYKLPDDFTGCVIAWNSNNLDSKVGGNYNYLYRL
FRKSNLKPFERDISTEIYQAGSTPCNGVEGFNCYFPLQSYGFQPTNGVGYQPYRVVVLSFELLHA
PATVCGPKKSTPLVKNKCVNFNFNGLTGTGVLTESNKKFLPFQQFGRDIADTTDAVRDPQTLEIL
DITPCSFGGVSVITPGTNTSNQVAVLYQNVNCTEVPVAIHADQLTPTWRVYSTGSNVFQTRAGCL
IGAEHVNNSYECDIPIGAGICASYQTQTNSPRRARSVASQSIIAYTMSLGAENSVAYSNNSIAIP
TNFTISVTTEILPVSMTKTSVDCTMYICGDSTECSNLLLQYGSFCTQLNRALTGIAVEQDKNTQE
VFAQVKQIYKTPPIKDFGGFNFSQILPDPSKPSKRSFIEDLLFNKVTLADAGFIKQYGDCLGDIA
ARDLICAQKFNGLTVLPPLLTDEMIAQYTSALLAGTITSGWTFGAGAALQIPFAMQMAYRFNGIG
VTQNVLYENQKLIANQFNSAIGKIQDSLSSTASALGKLQDVVNQNAQALNTLVKQLSSNFGAISS
VLNDILSRLDKVEAEVQIDRLITGRLQSLQTYVTQQLIRAAEIRASANLAATKMSECVLGQSKRV
DFCGKGYHLMSFPQSAPHGVVFLHVTYVPAQEKNFTTAPAICHDGKAHFPREGVFVSNGTHWFVT
QRNFYEPQIITTDNTFVSGNCDVVIGIVNNTVYDPLQPELDSFKEELDKYFKNHTSPDVDLGDIS
GINASVVNIQKEIDRLNEVAKNLNESLIDLQELGKYEQYIKWPWYIWLGFIAGLIAIVMVTIMLC
CMTSCCSCLKGCCSCGSCCKFDEDDSEPVLKGVKLHYT
SEQ ID NO 247: SEQ ID NO 1 + D614N + G880C + F888C
MFVFLVLLPLVSSQCVNLTTRTQLPPAYTNSFTRGVYYPDKVFRSSVLHSTQDLFLPFFSNVTWF
HAIHVSGTNGTKRFDNPVLPFNDGVYFASTEKSNIIRGWIFGTTLDSKTQSLLIVNNATNVVIKV
CEFQFCNDPFLGVYYHKNNKSWMESEFRVYSSANNCTFEYVSQPFLMDLEGKQGNFKNLREFVFK
NIDGYFKIYSKHTPINLVRDLPQGFSALEPLVDLPIGINITRFQTLLALHRSYLTPGDSSSGWTA
GAAAYYVGYLQPRTFLLKYNENGTITDAVDCALDPLSETKCTLKSFTVEKGIYQTSNFRVQPTES
IVRFPNITNLCPFGEVFNATRFASVYAWNRKRISNCVADYSVLYNSASFSTFKCYGVSPTKLNDL
CFTNVYADSFVIRGDEVRQIAPGQTGKIADYNYKLPDDFTGCVIAWNSNNLDSKVGGNYNYLYRL
FRKSNLKPFERDISTEIYQAGSTPCNGVEGFNCYFPLQSYGFQPTNGVGYQPYRVVVLSFELLHA
PATVCGPKKSTNLVKNKCVNFNFNGLTGTGVLTESNKKFLPFQQFGRDIADTTDAVRDPQTLEIL
DITPCSFGGVSVITPGTNTSNQVAVLYQNVNCTEVPVAIHADQLTPTWRVYSTGSNVFQTRAGCL
IGAEHVNNSYECDIPIGAGICASYQTQTNSPRRARSVASQSIIAYTMSLGAENSVAYSNNSIAIP
TNFTISVTTEILPVSMTKTSVDCTMYICGDSTECSNLLLQYGSFCTQLNRALTGIAVEQDKNTQE
VFAQVKQIYKTPPIKDFGGFNFSQILPDPSKPSKRSFIEDLLFNKVTLADAGFIKQYGDCLGDIA
ARDLICAQKFNGLTVLPPLLTDEMIAQYTSALLACTITSGWTCGAGAALQIPFAMQMAYRFNGIG
VTQNVLYENQKLIANQFNSAIGKIQDSLSSTASALGKLQDVVNQNAQALNTLVKQLSSNFGAISS
VLNDILSRLDKVEAEVQIDRLITGRLQSLQTYVTQQLIRAAEIRASANLAATKMSECVLGQSKRV
DFCGKGYHLMSFPQSAPHGVVFLHVTYVPAQEKNFTTAPAICHDGKAHFPREGVFVSNGTHWFVT
QRNFYEPQIITTDNTFVSGNCDVVIGIVNNTVYDPLQPELDSFKEELDKYFKNHTSPDVDLGDIS
GINASVVNIQKEIDRLNEVAKNLNESLIDLQELGKYEQYIKWPWYIWLGFIAGLIAIVMVTIMLC
CMTSCCSCLKGCCSCGSCCKFDEDDSEPVLKGVKLHYT
SEQ ID NO 248: SEQ ID NO 1 + D614N + S884C + A893C
MFVFLVLLPLVSSQCVNLTTRTQLPPAYTNSFTRGVYYPDKVFRSSVLHSTQDLFLPFFSNVTWF
HAIHVSGTNGTKRFDNPVLPFNDGVYFASTEKSNIIRGWIFGTTLDSKTQSLLIVNNATNVVIKV
CEFQFCNDPFLGVYYHKNNKSWMESEFRVYSSANNCTFEYVSQPFLMDLEGKQGNFKNLREFVFK
NIDGYFKIYSKHTPINLVRDLPQGFSALEPLVDLPIGINITRFQTLLALHRSYLTPGDSSSGWTA
GAAAYYVGYLQPRTFLLKYNENGTITDAVDCALDPLSETKCTLKSFTVEKGIYQTSNFRVQPTES
IVRFPNITNLCPFGEVFNATRFASVYAWNRKRISNCVADYSVLYNSASFSTFKCYGVSPTKLNDL
CFTNVYADSFVIRGDEVRQIAPGQTGKIADYNYKLPDDFTGCVIAWNSNNLDSKVGGNYNYLYRL
FRKSNLKPFERDISTEIYQAGSTPCNGVEGFNCYFPLQSYGFQPTNGVGYQPYRVVVLSFELLHA
PATVCGPKKSTNLVKNKCVNFNFNGLTGTGVLTESNKKFLPFQQFGRDIADTTDAVRDPQTLEIL
DITPCSFGGVSVITPGTNTSNQVAVLYQNVNCTEVPVAIHADQLTPTWRVYSTGSNVFQTRAGCL
IGAEHVNNSYECDIPIGAGICASYQTQTNSPRRARSVASQSIIAYTMSLGAENSVAYSNNSIAIP
TNFTISVTTEILPVSMTKTSVDCTMYICGDSTECSNLLLQYGSFCTQLNRALTGIAVEQDKNTQE
VFAQVKQIYKTPPIKDFGGFNFSQILPDPSKPSKRSFIEDLLFNKVTLADAGFIKQYGDCLGDIA
ARDLICAQKFNGLTVLPPLLTDEMIAQYTSALLAGTITCGWTFGAGACLQIPFAMQMAYRFNGIG
VTQNVLYENQKLIANQFNSAIGKIQDSLSSTASALGKLQDVVNQNAQALNTLVKQLSSNFGAISS
VLNDILSRLDKVEAEVQIDRLITGRLQSLQTYVTQQLIRAAEIRASANLAATKMSECVLGQSKRV
DFCGKGYHLMSFPQSAPHGVVFLHVTYVPAQEKNFTTAPAICHDGKAHFPREGVFVSNGTHWFVT
QRNFYEPQIITTDNTFVSGNCDVVIGIVNNTVYDPLQPELDSFKEELDKYFKNHTSPDVDLGDIS
GINASVVNIQKEIDRLNEVAKNLNESLIDLQELGKYEQYIKWPWYIWLGFIAGLIAIVMVTIMLC
CMTSCCSCLKGCCSCGSCCKFDEDDSEPVLKGVKLHYT
SEQ ID NO 249: SEQ ID NO 1 + T572I +
N532P
MFVFLVLLPLVSSQCVNLTTRTQLPPAYTNSFTRGVYYPDKVFRSSVLHSTQDLFLPFFSNVTWF
HAIHVSGTNGTKRFDNPVLPFNDGVYFASTEKSNIIRGWIFGTTLDSKTQSLLIVNNATNVVIKV
CEFQFCNDPFLGVYYHKNNKSWMESEFRVYSSANNCTFEYVSQPFLMDLEGKQGNFKNLREFVFK
NIDGYFKIYSKHTPINLVRDLPQGFSALEPLVDLPIGINITRFQTLLALHRSYLTPGDSSSGWTA
GAAAYYVGYLQPRTFLLKYNENGTITDAVDCALDPLSETKCTLKSFTVEKGIYQTSNFRVQPTES
IVRFPNITNLCPFGEVFNATRFASVYAWNRKRISNCVADYSVLYNSASFSTFKCYGVSPTKLNDL
CFTNVYADSFVIRGDEVRQIAPGQTGKIADYNYKLPDDFTGCVIAWNSNNLDSKVGGNYNYLYRL
FRKSNLKPFERDISTEIYQAGSTPCNGVEGFNCYFPLQSYGFQPTNGVGYQPYRVVVLSFELLHA
PATVCGPKKSTPLVKNKCVNFNFNGLTGTGVLTESNKKFLPFQQFGRDIADITDAVRDPQTLEIL
DITPCSFGGVSVITPGTNTSNQVAVLYQDVNCTEVPVAIHADQLTPTWRVYSTGSNVFQTRAGCL
IGAEHVNNSYECDIPIGAGICASYQTQTNSPRRARSVASQSIIAYTMSLGAENSVAYSNNSIAIP
TNFTISVTTEILPVSMTKTSVDCTMYICGDSTECSNLLLQYGSFCTQLNRALTGIAVEQDKNTQE
VFAQVKQIYKTPPIKDFGGFNFSQILPDPSKPSKRSFIEDLLFNKVTLADAGFIKQYGDCLGDIA
ARDLICAQKFNGLTVLPPLLTDEMIAQYTSALLAGTITSGWTFGAGAALQIPFAMQMAYRFNGIG
VTQNVLYENQKLIANQFNSAIGKIQDSLSSTASALGKLQDVVNQNAQALNTLVKQLSSNFGAISS
VLNDILSRLDKVEAEVQIDRLITGRLQSLQTYVTQQLIRAAEIRASANLAATKMSECVLGQSKRV
DFCGKGYHLMSFPQSAPHGVVFLHVTYVPAQEKNFTTAPAICHDGKAHFPREGVFVSNGTHWFVT
QRNFYEPQIITTDNTFVSGNCDVVIGIVNNTVYDPLQPELDSFKEELDKYFKNHTSPDVDLGDIS
GINASVVNIQKEIDRLNEVAKNLNESLIDLQELGKYEQYIKWPWYIWLGFIAGLIAIVMVTIMLC
CMTSCCSCLKGCCSCGSCCKFDEDDSEPVLKGVKLHYT
SEQ ID NO 250: SEQ ID NO 1 + T572I +
G880C + F888C
MFVFLVLLPLVSSQCVNLTTRTQLPPAYTNSFTRGVYYPDKVFRSSVLHSTQDLFLPFFSNVTWF
HAIHVSGTNGTKRFDNPVLPFNDGVYFASTEKSNIIRGWIFGTTLDSKTQSLLIVNNATNVVIKV
CEFQFCNDPFLGVYYHKNNKSWMESEFRVYSSANNCTFEYVSQPFLMDLEGKQGNFKNLREFVFK
NIDGYFKIYSKHTPINLVRDLPQGFSALEPLVDLPIGINITRFQTLLALHRSYLTPGDSSSGWTA
GAAAYYVGYLQPRTFLLKYNENGTITDAVDCALDPLSETKCTLKSFTVEKGIYQTSNFRVQPTES
IVRFPNITNLCPFGEVFNATRFASVYAWNRKRISNCVADYSVLYNSASFSTFKCYGVSPTKLNDL
CFTNVYADSFVIRGDEVRQIAPGQTGKIADYNYKLPDDFTGCVIAWNSNNLDSKVGGNYNYLYRL
FRKSNLKPFERDISTEIYQAGSTPCNGVEGFNCYFPLQSYGFQPTNGVGYQPYRVVVLSFELLHA
PATVCGPKKSTNLVKNKCVNFNFNGLTGTGVLTESNKKFLPFQQFGRDIADITDAVRDPQTLEIL
DITPCSFGGVSVITPGTNTSNQVAVLYQDVNCTEVPVAIHADQLTPTWRVYSTGSNVFQTRAGCL
IGAEHVNNSYECDIPIGAGICASYQTQTNSPRRARSVASQSIIAYTMSLGAENSVAYSNNSIAIP
TNFTISVTTEILPVSMTKTSVDCTMYICGDSTECSNLLLQYGSFCTQLNRALTGIAVEQDKNTQE
VFAQVKQIYKTPPIKDFGGFNFSQILPDPSKPSKRSFIEDLLFNKVTLADAGFIKQYGDCLGDIA
ARDLICAQKFNGLTVLPPLLTDEMIAQYTSALLACTITSGWTCGAGAALQIPFAMQMAYRFNGIG
VTQNVLYENQKLIANQFNSAIGKIQDSLSSTASALGKLQDVVNQNAQALNTLVKQLSSNFGAISS
VLNDILSRLDKVEAEVQIDRLITGRLQSLQTYVTQQLIRAAEIRASANLAATKMSECVLGQSKRV
DFCGKGYHLMSFPQSAPHGVVFLHVTYVPAQEKNFTTAPAICHDGKAHFPREGVFVSNGTHWFVT
QRNFYEPQIITTDNTFVSGNCDVVIGIVNNTVYDPLQPELDSFKEELDKYFKNHTSPDVDLGDIS
GINASVVNIQKEIDRLNEVAKNLNESLIDLQELGKYEQYIKWPWYIWLGFIAGLIAIVMVTIMLC
CMTSCCSCLKGCCSCGSCCKFDEDDSEPVLKGVKLHYT
SEQ ID NO 251: SEQ ID NO 1 + T572I +
S884C + A893C
MFVFLVLLPLVSSQCVNLTTRTQLPPAYTNSFTRGVYYPDKVFRSSVLHSTQDLFLPFFSNVTWF
HAIHVSGTNGTKRFDNPVLPFNDGVYFASTEKSNIIRGWIFGTTLDSKTQSLLIVNNATNVVIKV
CEFQFCNDPFLGVYYHKNNKSWMESEFRVYSSANNCTFEYVSQPFLMDLEGKQGNFKNLREFVFK
NIDGYFKIYSKHTPINLVRDLPQGFSALEPLVDLPIGINITRFQTLLALHRSYLTPGDSSSGWTA
GAAAYYVGYLQPRTFLLKYNENGTITDAVDCALDPLSETKCTLKSFTVEKGIYQTSNFRVQPTES
IVRFPNITNLCPFGEVFNATRFASVYAWNRKRISNCVADYSVLYNSASFSTFKCYGVSPTKLNDL
CFTNVYADSFVIRGDEVRQIAPGQTGKIADYNYKLPDDFTGCVIAWNSNNLDSKVGGNYNYLYRL
FRKSNLKPFERDISTEIYQAGSTPCNGVEGFNCYFPLQSYGFQPTNGVGYQPYRVVVLSFELLHA
PATVCGPKKSTNLVKNKCVNFNFNGLTGTGVLTESNKKFLPFQQFGRDIADITDAVRDPQTLEIL
DITPCSFGGVSVITPGTNTSNQVAVLYQDVNCTEVPVAIHADQLTPTWRVYSTGSNVFQTRAGCL
IGAEHVNNSYECDIPIGAGICASYQTQTNSPRRARSVASQSIIAYTMSLGAENSVAYSNNSIAIP
TNFTISVTTEILPVSMTKTSVDCTMYICGDSTECSNLLLQYGSFCTQLNRALTGIAVEQDKNTQE
VFAQVKQIYKTPPIKDFGGFNFSQILPDPSKPSKRSFIEDLLFNKVTLADAGFIKQYGDCLGDIA
ARDLICAQKFNGLTVLPPLLTDEMIAQYTSALLAGTITCGWTFGAGACLQIPFAMQMAYRFNGIG
VTQNVLYENQKLIANQFNSAIGKIQDSLSSTASALGKLQDVVNQNAQALNTLVKQLSSNFGAISS
VLNDILSRLDKVEAEVQIDRLITGRLQSLQTYVTQQLIRAAEIRASANLAATKMSECVLGQSKRV
DFCGKGYHLMSFPQSAPHGVVFLHVTYVPAQEKNFTTAPAICHDGKAHFPREGVFVSNGTHWFVT
QRNFYEPQIITTDNTFVSGNCDVVIGIVNNTVYDPLQPELDSFKEELDKYFKNHTSPDVDLGDIS
GINASVVNIQKEIDRLNEVAKNLNESLIDLQELGKYEQYIKWPWYIWLGFIAGLIAIVMVTIMLC
CMTSCCSCLKGCCSCGSCCKFDEDDSEPVLKGVKLHYT
SEQ ID NO 252: SEQ ID NO 1 + N532P + G880C + F888C
MFVFLVLLPLVSSQCVNLTTRTQLPPAYTNSFTRGVYYPDKVFRSSVLHSTQDLFLPFFSNVTWF
HAIHVSGTNGTKRFDNPVLPFNDGVYFASTEKSNIIRGWIFGTTLDSKTQSLLIVNNATNVVIKV
CEFQFCNDPFLGVYYHKNNKSWMESEFRVYSSANNCTFEYVSQPFLMDLEGKQGNFKNLREFVFK
NIDGYFKIYSKHTPINLVRDLPQGFSALEPLVDLPIGINITRFQTLLALHRSYLTPGDSSSGWTA
GAAAYYVGYLQPRTFLLKYNENGTITDAVDCALDPLSETKCTLKSFTVEKGIYQTSNFRVQPTES
IVRFPNITNLCPFGEVFNATRFASVYAWNRKRISNCVADYSVLYNSASFSTFKCYGVSPTKLNDL
CFTNVYADSFVIRGDEVRQIAPGQTGKIADYNYKLPDDFTGCVIAWNSNNLDSKVGGNYNYLYRL
FRKSNLKPFERDISTEIYQAGSTPCNGVEGFNCYFPLQSYGFQPTNGVGYQPYRVVVLSFELLHA
PATVCGPKKSTPLVKNKCVNFNFNGLTGTGVLTESNKKFLPFQQFGRDIADTTDAVRDPQTLEIL
DITPCSFGGVSVITPGTNTSNQVAVLYQDVNCTEVPVAIHADQLTPTWRVYSTGSNVFQTRAGCL
IGAEHVNNSYECDIPIGAGICASYQTQTNSPRRARSVASQSIIAYTMSLGAENSVAYSNNSIAIP
TNFTISVTTEILPVSMTKTSVDCTMYICGDSTECSNLLLQYGSFCTQLNRALTGIAVEQDKNTQE
VFAQVKQIYKTPPIKDFGGFNFSQILPDPSKPSKRSFIEDLLFNKVTLADAGFIKQYGDCLGDIA
ARDLICAQKFNGLTVLPPLLTDEMIAQYTSALLACTITSGWTCGAGAALQIPFAMQMAYRFNGIG
VTQNVLYENQKLIANQFNSAIGKIQDSLSSTASALGKLQDVVNQNAQALNTLVKQLSSNFGAISS
VLNDILSRLDKVEAEVQIDRLITGRLQSLQTYVTQQLIRAAEIRASANLAATKMSECVLGQSKRV
DFCGKGYHLMSFPQSAPHGVVFLHVTYVPAQEKNFTTAPAICHDGKAHFPREGVFVSNGTHWFVT
QRNFYEPQIITTDNTFVSGNCDVVIGIVNNTVYDPLQPELDSFKEELDKYFKNHTSPDVDLGDIS
GINASVVNIQKEIDRLNEVAKNLNESLIDLQELGKYEQYIKWPWYIWLGFIAGLIAIVMVTIMLC
CMTSCCSCLKGCCSCGSCCKFDEDDSEPVLKGVKLHYT
SEQ ID NO 253: SEQ ID NO 1 + N532P + S884C + A893C
MFVFLVLLPLVSSQCVNLTTRTQLPPAYTNSFTRGVYYPDKVFRSSVLHSTQDLFLPFFSNVTWF
HAIHVSGTNGTKRFDNPVLPFNDGVYFASTEKSNIIRGWIFGTTLDSKTQSLLIVNNATNVVIKV
CEFQFCNDPFLGVYYHKNNKSWMESEFRVYSSANNCTFEYVSQPFLMDLEGKQGNFKNLREFVFK
NIDGYFKIYSKHTPINLVRDLPQGFSALEPLVDLPIGINITRFQTLLALHRSYLTPGDSSSGWTA
GAAAYYVGYLQPRTFLLKYNENGTITDAVDCALDPLSETKCTLKSFTVEKGIYQTSNFRVQPTES
IVRFPNITNLCPFGEVFNATRFASVYAWNRKRISNCVADYSVLYNSASFSTFKCYGVSPTKLNDL
CFTNVYADSFVIRGDEVRQIAPGQTGKIADYNYKLPDDFTGCVIAWNSNNLDSKVGGNYNYLYRL
FRKSNLKPFERDISTEIYQAGSTPCNGVEGFNCYFPLQSYGFQPTNGVGYQPYRVVVLSFELLHA
PATVCGPKKSTPLVKNKCVNFNFNGLTGTGVLTESNKKFLPFQQFGRDIADTTDAVRDPQTLEIL
DITPCSFGGVSVITPGTNTSNQVAVLYQDVNCTEVPVAIHADQLTPTWRVYSTGSNVFQTRAGCL
IGAEHVNNSYECDIPIGAGICASYQTQTNSPRRARSVASQSIIAYTMSLGAENSVAYSNNSIAIP
TNFTISVTTEILPVSMTKTSVDCTMYICGDSTECSNLLLQYGSFCTQLNRALTGIAVEQDKNTQE
VFAQVKQIYKTPPIKDFGGFNFSQILPDPSKPSKRSFIEDLLFNKVTLADAGFIKQYGDCLGDIA
ARDLICAQKFNGLTVLPPLLTDEMIAQYTSALLAGTITCGWTFGAGACLQIPFAMQMAYRFNGIG
VTQNVLYENQKLIANQFNSAIGKIQDSLSSTASALGKLQDVVNQNAQALNTLVKQLSSNFGAISS
VLNDILSRLDKVEAEVQIDRLITGRLQSLQTYVTQQLIRAAEIRASANLAATKMSECVLGQSKRV
DFCGKGYHLMSFPQSAPHGVVFLHVTYVPAQEKNFTTAPAICHDGKAHFPREGVFVSNGTHWFVT
QRNFYEPQIITTDNTFVSGNCDVVIGIVNNTVYDPLQPELDSFKEELDKYFKNHTSPDVDLGDIS
GINASVVNIQKEIDRLNEVAKNLNESLIDLQELGKYEQYIKWPWYIWLGFIAGLIAIVMVTIMLC
CMTSCCSCLKGCCSCGSCCKFDEDDSEPVLKGVKLHYT
SEQ ID NO 254: SEQ ID NO 1 + A942P + A892P + D614N
MFVFLVLLPLVSSQCVNLTTRTQLPPAYTNSFTRGVYYPDKVFRSSVLHSTQDLFLPFFSNVTWF
HAIHVSGTNGTKRFDNPVLPFNDGVYFASTEKSNIIRGWIFGTTLDSKTQSLLIVNNATNVVIKV
CEFQFCNDPFLGVYYHKNNKSWMESEFRVYSSANNCTFEYVSQPFLMDLEGKQGNFKNLREFVFK
NIDGYFKIYSKHTPINLVRDLPQGFSALEPLVDLPIGINITRFQTLLALHRSYLTPGDSSSGWTA
GAAAYYVGYLQPRTFLLKYNENGTITDAVDCALDPLSETKCTLKSFTVEKGIYQTSNFRVQPTES
IVRFPNITNLCPFGEVFNATRFASVYAWNRKRISNCVADYSVLYNSASFSTFKCYGVSPTKLNDL
CFTNVYADSFVIRGDEVRQIAPGQTGKIADYNYKLPDDFTGCVIAWNSNNLDSKVGGNYNYLYRL
FRKSNLKPFERDISTEIYQAGSTPCNGVEGFNCYFPLQSYGFQPTNGVGYQPYRVVVLSFELLHA
PATVCGPKKSTNLVKNKCVNFNFNGLTGTGVLTESNKKFLPFQQFGRDIADTTDAVRDPQTLEIL
DITPCSFGGVSVITPGTNTSNQVAVLYQNVNCTEVPVAIHADQLTPTWRVYSTGSNVFQTRAGCL
IGAEHVNNSYECDIPIGAGICASYQTQTNSPRRARSVASQSIIAYTMSLGAENSVAYSNNSIAIP
TNFTISVTTEILPVSMTKTSVDCTMYICGDSTECSNLLLQYGSFCTQLNRALTGIAVEQDKNTQE
VFAQVKQIYKTPPIKDFGGFNFSQILPDPSKPSKRSFIEDLLFNKVTLADAGFIKQYGDCLGDIA
ARDLICAQKFNGLTVLPPLLTDEMIAQYTSALLAGTITSGWTFGAGPALQIPFAMQMAYRFNGIG
VTQNVLYENQKLIANQFNSAIGKIQDSLSSTPSALGKLQDVVNQNAQALNTLVKQLSSNFGAISS
VLNDILSRLDKVEAEVQIDRLITGRLQSLQTYVTQQLIRAAEIRASANLAATKMSECVLGQSKRV
DFCGKGYHLMSFPQSAPHGVVFLHVTYVPAQEKNFTTAPAICHDGKAHFPREGVFVSNGTHWFVT
QRNFYEPQIITTDNTFVSGNCDVVIGIVNNTVYDPLQPELDSFKEELDKYFKNHTSPDVDLGDIS
GINASVVNIQKEIDRLNEVAKNLNESLIDLQELGKYEQYIKWPWYIWLGFIAGLIAIVMVTIMLC
CMTSCCSCLKGCCSCGSCCKFDEDDSEPVLKGVKLHYT
SEQ ID NO 255: SEQ ID NO 1 + A942P + A892P + T572I
MFVFLVLLPLVSSQCVNLTTRTQLPPAYTNSFTRGVYYPDKVFRSSVLHSTQDLFLPFFSNVTWF
HAIHVSGTNGTKRFDNPVLPFNDGVYFASTEKSNIIRGWIFGTTLDSKTQSLLIVNNATNVVIKV
CEFQFCNDPFLGVYYHKNNKSWMESEFRVYSSANNCTFEYVSQPFLMDLEGKQGNFKNLREFVFK
NIDGYFKIYSKHTPINLVRDLPQGFSALEPLVDLPIGINITRFQTLLALHRSYLTPGDSSSGWTA
GAAAYYVGYLQPRTFLLKYNENGTITDAVDCALDPLSETKCTLKSFTVEKGIYQTSNFRVQPTES
IVRFPNITNLCPFGEVFNATRFASVYAWNRKRISNCVADYSVLYNSASFSTFKCYGVSPTKLNDL
CFTNVYADSFVIRGDEVRQIAPGQTGKIADYNYKLPDDFTGCVIAWNSNNLDSKVGGNYNYLYRL
FRKSNLKPFERDISTEIYQAGSTPCNGVEGFNCYFPLQSYGFQPTNGVGYQPYRVVVLSFELLHA
PATVCGPKKSTNLVKNKCVNFNFNGLTGTGVLTESNKKFLPFQQFGRDIADITDAVRDPQTLEIL
DITPCSFGGVSVITPGTNTSNQVAVLYQDVNCTEVPVAIHADQLTPTWRVYSTGSNVFQTRAGCL
IGAEHVNNSYECDIPIGAGICASYQTQTNSPRRARSVASQSIIAYTMSLGAENSVAYSNNSIAIP
TNFTISVTTEILPVSMTKTSVDCTMYICGDSTECSNLLLQYGSFCTQLNRALTGIAVEQDKNTQE
VFAQVKQIYKTPPIKDFGGFNFSQILPDPSKPSKRSFIEDLLFNKVTLADAGFIKQYGDCLGDIA
ARDLICAQKFNGLTVLPPLLTDEMIAQYTSALLAGTITSGWTFGAGPALQIPFAMQMAYRFNGIG
VTQNVLYENQKLIANQFNSAIGKIQDSLSSTPSALGKLQDVVNQNAQALNTLVKQLSSNFGAISS
VLNDILSRLDKVEAEVQIDRLITGRLQSLQTYVTQQLIRAAEIRASANLAATKMSECVLGQSKRV
DFCGKGYHLMSFPQSAPHGVVFLHVTYVPAQEKNFTTAPAICHDGKAHFPREGVFVSNGTHWFVT
QRNFYEPQIITTDNTFVSGNCDVVIGIVNNTVYDPLQPELDSFKEELDKYFKNHTSPDVDLGDIS
GINASVVNIQKEIDRLNEVAKNLNESLIDLQELGKYEQYIKWPWYIWLGFIAGLIAIVMVTIMLC
CMTSCCSCLKGCCSCGSCCKFDEDDSEPVLKGVKLHYT
SEQ ID NO 256: SEQ ID NO 1 + A942P + A892P + N532P
MFVFLVLLPLVSSQCVNLTTRTQLPPAYTNSFTRGVYYPDKVFRSSVLHSTQDLFLPFFSNVTWF
HAIHVSGTNGTKRFDNPVLPFNDGVYFASTEKSNIIRGWIFGTTLDSKTQSLLIVNNATNVVIKV
CEFQFCNDPFLGVYYHKNNKSWMESEFRVYSSANNCTFEYVSQPFLMDLEGKQGNFKNLREFVFK
NIDGYFKIYSKHTPINLVRDLPQGFSALEPLVDLPIGINITRFQTLLALHRSYLTPGDSSSGWTA
GAAAYYVGYLQPRTFLLKYNENGTITDAVDCALDPLSETKCTLKSFTVEKGIYQTSNFRVQPTES
IVRFPNITNLCPFGEVFNATRFASVYAWNRKRISNCVADYSVLYNSASFSTFKCYGVSPTKLNDL
CFTNVYADSFVIRGDEVRQIAPGQTGKIADYNYKLPDDFTGCVIAWNSNNLDSKVGGNYNYLYRL
FRKSNLKPFERDISTEIYQAGSTPCNGVEGFNCYFPLQSYGFQPTNGVGYQPYRVVVLSFELLHA
PATVCGPKKSTPLVKNKCVNFNFNGLTGTGVLTESNKKFLPFQQFGRDIADTTDAVRDPQTLEIL
DITPCSFGGVSVITPGTNTSNQVAVLYQDVNCTEVPVAIHADQLTPTWRVYSTGSNVFQTRAGCL
IGAEHVNNSYECDIPIGAGICASYQTQTNSPRRARSVASQSIIAYTMSLGAENSVAYSNNSIAIP
TNFTISVTTEILPVSMTKTSVDCTMYICGDSTECSNLLLQYGSFCTQLNRALTGIAVEQDKNTQE
VFAQVKQIYKTPPIKDFGGFNFSQILPDPSKPSKRSFIEDLLFNKVTLADAGFIKQYGDCLGDIA
ARDLICAQKFNGLTVLPPLLTDEMIAQYTSALLAGTITSGWTFGAGPALQIPFAMQMAYRFNGIG
VTQNVLYENQKLIANQFNSAIGKIQDSLSSTPSALGKLQDVVNQNAQALNTLVKQLSSNFGAISS
VLNDILSRLDKVEAEVQIDRLITGRLQSLQTYVTQQLIRAAEIRASANLAATKMSECVLGQSKRV
DFCGKGYHLMSFPQSAPHGVVFLHVTYVPAQEKNFTTAPAICHDGKAHFPREGVFVSNGTHWFVT
QRNFYEPQIITTDNTFVSGNCDVVIGIVNNTVYDPLQPELDSFKEELDKYFKNHTSPDVDLGDIS
GINASVVNIQKEIDRLNEVAKNLNESLIDLQELGKYEQYIKWPWYIWLGFIAGLIAIVMVTIMLC
CMTSCCSCLKGCCSCGSCCKFDEDDSEPVLKGVKLHYT
SEQ ID NO 257: SEQ ID NO 1 + A942P + A892P + G880C + F888C
MFVFLVLLPLVSSQCVNLTTRTQLPPAYTNSFTRGVYYPDKVFRSSVLHSTQDLFLPFFSNVTWF
HAIHVSGTNGTKRFDNPVLPFNDGVYFASTEKSNIIRGWIFGTTLDSKTQSLLIVNNATNVVIKV
CEFQFCNDPFLGVYYHKNNKSWMESEFRVYSSANNCTFEYVSQPFLMDLEGKQGNFKNLREFVFK
NIDGYFKIYSKHTPINLVRDLPQGFSALEPLVDLPIGINITRFQTLLALHRSYLTPGDSSSGWTA
GAAAYYVGYLQPRTFLLKYNENGTITDAVDCALDPLSETKCTLKSFTVEKGIYQTSNFRVQPTES
IVRFPNITNLCPFGEVFNATRFASVYAWNRKRISNCVADYSVLYNSASFSTFKCYGVSPTKLNDL
CFTNVYADSFVIRGDEVRQIAPGQTGKIADYNYKLPDDFTGCVIAWNSNNLDSKVGGNYNYLYRL
FRKSNLKPFERDISTEIYQAGSTPCNGVEGFNCYFPLQSYGFQPTNGVGYQPYRVVVLSFELLHA
PATVCGPKKSTNLVKNKCVNFNFNGLTGTGVLTESNKKFLPFQQFGRDIADTTDAVRDPQTLEIL
DITPCSFGGVSVITPGTNTSNQVAVLYQDVNCTEVPVAIHADQLTPTWRVYSTGSNVFQTRAGCL
IGAEHVNNSYECDIPIGAGICASYQTQTNSPRRARSVASQSIIAYTMSLGAENSVAYSNNSIAIP
TNFTISVTTEILPVSMTKTSVDCTMYICGDSTECSNLLLQYGSFCTQLNRALTGIAVEQDKNTQE
VFAQVKQIYKTPPIKDFGGFNFSQILPDPSKPSKRSFIEDLLFNKVTLADAGFIKQYGDCLGDIA
ARDLICAQKFNGLTVLPPLLTDEMIAQYTSALLACTITSGWTCGAGPALQIPFAMQMAYRFNGIG
VTQNVLYENQKLIANQFNSAIGKIQDSLSSTPSALGKLQDVVNQNAQALNTLVKQLSSNFGAISS
VLNDILSRLDKVEAEVQIDRLITGRLQSLQTYVTQQLIRAAEIRASANLAATKMSECVLGQSKRV
DFCGKGYHLMSFPQSAPHGVVFLHVTYVPAQEKNFTTAPAICHDGKAHFPREGVFVSNGTHWFVT
QRNFYEPQIITTDNTFVSGNCDVVIGIVNNTVYDPLQPELDSFKEELDKYFKNHTSPDVDLGDIS
GINASVVNIQKEIDRLNEVAKNLNESLIDLQELGKYEQYIKWPWYIWLGFIAGLIAIVMVTIMLC
CMTSCCSCLKGCCSCGSCCKFDEDDSEPVLKGVKLHYT
SEQ ID NO 258: SEQ ID NO 1 + A942P + A892P + S884C + A893C
MFVFLVLLPLVSSQCVNLTTRTQLPPAYTNSFTRGVYYPDKVFRSSVLHSTQDLFLPFFSNVTWF
HAIHVSGTNGTKRFDNPVLPFNDGVYFASTEKSNIIRGWIFGTTLDSKTQSLLIVNNATNVVIKV
CEFQFCNDPFLGVYYHKNNKSWMESEFRVYSSANNCTFEYVSQPFLMDLEGKQGNFKNLREFVFK
NIDGYFKIYSKHTPINLVRDLPQGFSALEPLVDLPIGINITRFQTLLALHRSYLTPGDSSSGWTA
GAAAYYVGYLQPRTFLLKYNENGTITDAVDCALDPLSETKCTLKSFTVEKGIYQTSNFRVQPTES
IVRFPNITNLCPFGEVFNATRFASVYAWNRKRISNCVADYSVLYNSASFSTFKCYGVSPTKLNDL
CFTNVYADSFVIRGDEVRQIAPGQTGKIADYNYKLPDDFTGCVIAWNSNNLDSKVGGNYNYLYRL
FRKSNLKPFERDISTEIYQAGSTPCNGVEGFNCYFPLQSYGFQPTNGVGYQPYRVVVLSFELLHA
PATVCGPKKSTNLVKNKCVNFNFNGLTGTGVLTESNKKFLPFQQFGRDIADTTDAVRDPQTLEIL
DITPCSFGGVSVITPGTNTSNQVAVLYQDVNCTEVPVAIHADQLTPTWRVYSTGSNVFQTRAGCL
IGAEHVNNSYECDIPIGAGICASYQTQTNSPRRARSVASQSIIAYTMSLGAENSVAYSNNSIAIP
TNFTISVTTEILPVSMTKTSVDCTMYICGDSTECSNLLLQYGSFCTQLNRALTGIAVEQDKNTQE
VFAQVKQIYKTPPIKDFGGFNFSQILPDPSKPSKRSFIEDLLFNKVTLADAGFIKQYGDCLGDIA
ARDLICAQKFNGLTVLPPLLTDEMIAQYTSALLAGTITCGWTFGAGPCLQIPFAMQMAYRFNGIG
VTQNVLYENQKLIANQFNSAIGKIQDSLSSTPSALGKLQDVVNQNAQALNTLVKQLSSNFGAISS
VLNDILSRLDKVEAEVQIDRLITGRLQSLQTYVTQQLIRAAEIRASANLAATKMSECVLGQSKRV
DFCGKGYHLMSFPQSAPHGVVFLHVTYVPAQEKNFTTAPAICHDGKAHFPREGVFVSNGTHWFVT
QRNFYEPQIITTDNTFVSGNCDVVIGIVNNTVYDPLQPELDSFKEELDKYFKNHTSPDVDLGDIS
GINASVVNIQKEIDRLNEVAKNLNESLIDLQELGKYEQYIKWPWYIWLGFIAGLIAIVMVTIMLC
CMTSCCSCLKGCCSCGSCCKFDEDDSEPVLKGVKLHYT
SEQ ID NO 259: SEQ ID NO 1 + A942P + D614N + T572I
MFVFLVLLPLVSSQCVNLTTRTQLPPAYTNSFTRGVYYPDKVFRSSVLHSTQDLFLPFFSNVTWF
HAIHVSGTNGTKRFDNPVLPFNDGVYFASTEKSNIIRGWIFGTTLDSKTQSLLIVNNATNVVIKV
CEFQFCNDPFLGVYYHKNNKSWMESEFRVYSSANNCTFEYVSQPFLMDLEGKQGNFKNLREFVFK
NIDGYFKIYSKHTPINLVRDLPQGFSALEPLVDLPIGINITRFQTLLALHRSYLTPGDSSSGWTA
GAAAYYVGYLQPRTFLLKYNENGTITDAVDCALDPLSETKCTLKSFTVEKGIYQTSNFRVQPTES
IVRFPNITNLCPFGEVFNATRFASVYAWNRKRISNCVADYSVLYNSASFSTFKCYGVSPTKLNDL
CFTNVYADSFVIRGDEVRQIAPGQTGKIADYNYKLPDDFTGCVIAWNSNNLDSKVGGNYNYLYRL
FRKSNLKPFERDISTEIYQAGSTPCNGVEGFNCYFPLQSYGFQPTNGVGYQPYRVVVLSFELLHA
PATVCGPKKSTNLVKNKCVNFNFNGLTGTGVLTESNKKFLPFQQFGRDIADITDAVRDPQTLEIL
DITPCSFGGVSVITPGTNTSNQVAVLYQNVNCTEVPVAIHADQLTPTWRVYSTGSNVFQTRAGCL
IGAEHVNNSYECDIPIGAGICASYQTQTNSPRRARSVASQSIIAYTMSLGAENSVAYSNNSIAIP
TNFTISVTTEILPVSMTKTSVDCTMYICGDSTECSNLLLQYGSFCTQLNRALTGIAVEQDKNTQE
VFAQVKQIYKTPPIKDFGGFNFSQILPDPSKPSKRSFIEDLLFNKVTLADAGFIKQYGDCLGDIA
ARDLICAQKFNGLTVLPPLLTDEMIAQYTSALLAGTITSGWTFGAGAALQIPFAMQMAYRFNGIG
VTQNVLYENQKLIANQFNSAIGKIQDSLSSTPSALGKLQDVVNQNAQALNTLVKQLSSNFGAISS
VLNDILSRLDKVEAEVQIDRLITGRLQSLQTYVTQQLIRAAEIRASANLAATKMSECVLGQSKRV
DFCGKGYHLMSFPQSAPHGVVFLHVTYVPAQEKNFTTAPAICHDGKAHFPREGVFVSNGTHWFVT
QRNFYEPQIITTDNTFVSGNCDVVIGIVNNTVYDPLQPELDSFKEELDKYFKNHTSPDVDLGDIS
GINASVVNIQKEIDRLNEVAKNLNESLIDLQELGKYEQYIKWPWYIWLGFIAGLIAIVMVTIMLC
CMTSCCSCLKGCCSCGSCCKFDEDDSEPVLKGVKLHYT
SEQ ID NO 260: SEQ ID NO 1 + A942P + D614N + N532P
MFVFLVLLPLVSSQCVNLTTRTQLPPAYTNSFTRGVYYPDKVFRSSVLHSTQDLFLPFFSNVTWF
HAIHVSGTNGTKRFDNPVLPFNDGVYFASTEKSNIIRGWIFGTTLDSKTQSLLIVNNATNVVIKV
CEFQFCNDPFLGVYYHKNNKSWMESEFRVYSSANNCTFEYVSQPFLMDLEGKQGNFKNLREFVFK
NIDGYFKIYSKHTPINLVRDLPQGFSALEPLVDLPIGINITRFQTLLALHRSYLTPGDSSSGWTA
GAAAYYVGYLQPRTFLLKYNENGTITDAVDCALDPLSETKCTLKSFTVEKGIYQTSNFRVQPTES
IVRFPNITNLCPFGEVFNATRFASVYAWNRKRISNCVADYSVLYNSASFSTFKCYGVSPTKLNDL
CFTNVYADSFVIRGDEVRQIAPGQTGKIADYNYKLPDDFTGCVIAWNSNNLDSKVGGNYNYLYRL
FRKSNLKPFERDISTEIYQAGSTPCNGVEGFNCYFPLQSYGFQPTNGVGYQPYRVVVLSFELLHA
PATVCGPKKSTPLVKNKCVNFNFNGLTGTGVLTESNKKFLPFQQFGRDIADTTDAVRDPQTLEIL
DITPCSFGGVSVITPGTNTSNQVAVLYQNVNCTEVPVAIHADQLTPTWRVYSTGSNVFQTRAGCL
IGAEHVNNSYECDIPIGAGICASYQTQTNSPRRARSVASQSIIAYTMSLGAENSVAYSNNSIAIP
TNFTISVTTEILPVSMTKTSVDCTMYICGDSTECSNLLLQYGSFCTQLNRALTGIAVEQDKNTQE
VFAQVKQIYKTPPIKDFGGFNFSQILPDPSKPSKRSFIEDLLFNKVTLADAGFIKQYGDCLGDIA
ARDLICAQKFNGLTVLPPLLTDEMIAQYTSALLAGTITSGWTFGAGAALQIPFAMQMAYRFNGIG
VTQNVLYENQKLIANQFNSAIGKIQDSLSSTPSALGKLQDVVNQNAQALNTLVKQLSSNFGAISS
VLNDILSRLDKVEAEVQIDRLITGRLQSLQTYVTQQLIRAAEIRASANLAATKMSECVLGQSKRV
DFCGKGYHLMSFPQSAPHGVVFLHVTYVPAQEKNFTTAPAICHDGKAHFPREGVFVSNGTHWFVT
QRNFYEPQIITTDNTFVSGNCDVVIGIVNNTVYDPLQPELDSFKEELDKYFKNHTSPDVDLGDIS
GINASVVNIQKEIDRLNEVAKNLNESLIDLQELGKYEQYIKWPWYIWLGFIAGLIAIVMVTIMLC
CMTSCCSCLKGCCSCGSCCKFDEDDSEPVLKGVKLHYT
SEQ ID NO 261: SEQ ID NO 1 + A942P + D614N + G880C + F888C
MFVFLVLLPLVSSQCVNLTTRTQLPPAYTNSFTRGVYYPDKVFRSSVLHSTQDLFLPFFSNVTWF
HAIHVSGTNGTKRFDNPVLPFNDGVYFASTEKSNIIRGWIFGTTLDSKTQSLLIVNNATNVVIKV
CEFQFCNDPFLGVYYHKNNKSWMESEFRVYSSANNCTFEYVSQPFLMDLEGKQGNFKNLREFVFK
NIDGYFKIYSKHTPINLVRDLPQGFSALEPLVDLPIGINITRFQTLLALHRSYLTPGDSSSGWTA
GAAAYYVGYLQPRTFLLKYNENGTITDAVDCALDPLSETKCTLKSFTVEKGIYQTSNFRVQPTES
IVRFPNITNLCPFGEVFNATRFASVYAWNRKRISNCVADYSVLYNSASFSTFKCYGVSPTKLNDL
CFTNVYADSFVIRGDEVRQIAPGQTGKIADYNYKLPDDFTGCVIAWNSNNLDSKVGGNYNYLYRL
FRKSNLKPFERDISTEIYQAGSTPCNGVEGFNCYFPLQSYGFQPTNGVGYQPYRVVVLSFELLHA
PATVCGPKKSTNLVKNKCVNFNFNGLTGTGVLTESNKKFLPFQQFGRDIADTTDAVRDPQTLEIL
DITPCSFGGVSVITPGTNTSNQVAVLYQNVNCTEVPVAIHADQLTPTWRVYSTGSNVFQTRAGCL
IGAEHVNNSYECDIPIGAGICASYQTQTNSPRRARSVASQSIIAYTMSLGAENSVAYSNNSIAIP
TNFTISVTTEILPVSMTKTSVDCTMYICGDSTECSNLLLQYGSFCTQLNRALTGIAVEQDKNTQE
VFAQVKQIYKTPPIKDFGGFNFSQILPDPSKPSKRSFIEDLLFNKVTLADAGFIKQYGDCLGDIA
ARDLICAQKFNGLTVLPPLLTDEMIAQYTSALLACTITSGWTCGAGAALQIPFAMQMAYRFNGIG
VTQNVLYENQKLIANQFNSAIGKIQDSLSSTPSALGKLQDVVNQNAQALNTLVKQLSSNFGAISS
VLNDILSRLDKVEAEVQIDRLITGRLQSLQTYVTQQLIRAAEIRASANLAATKMSECVLGQSKRV
DFCGKGYHLMSFPQSAPHGVVFLHVTYVPAQEKNFTTAPAICHDGKAHFPREGVFVSNGTHWFVT
QRNFYEPQIITTDNTFVSGNCDVVIGIVNNTVYDPLQPELDSFKEELDKYFKNHTSPDVDLGDIS
GINASVVNIQKEIDRLNEVAKNLNESLIDLQELGKYEQYIKWPWYIWLGFIAGLIAIVMVTIMLC
CMTSCCSCLKGCCSCGSCCKFDEDDSEPVLKGVKLHYT
SEQ ID NO 262: SEQ ID NO 1 + A942P + D614N + S884C + A893C
MFVFLVLLPLVSSQCVNLTTRTQLPPAYTNSFTRGVYYPDKVFRSSVLHSTQDLFLPFFSNVTWF
HAIHVSGTNGTKRFDNPVLPFNDGVYFASTEKSNIIRGWIFGTTLDSKTQSLLIVNNATNVVIKV
CEFQFCNDPFLGVYYHKNNKSWMESEFRVYSSANNCTFEYVSQPFLMDLEGKQGNFKNLREFVFK
NIDGYFKIYSKHTPINLVRDLPQGFSALEPLVDLPIGINITRFQTLLALHRSYLTPGDSSSGWTA
GAAAYYVGYLQPRTFLLKYNENGTITDAVDCALDPLSETKCTLKSFTVEKGIYQTSNFRVQPTES
IVRFPNITNLCPFGEVFNATRFASVYAWNRKRISNCVADYSVLYNSASFSTFKCYGVSPTKLNDL
CFTNVYADSFVIRGDEVRQIAPGQTGKIADYNYKLPDDFTGCVIAWNSNNLDSKVGGNYNYLYRL
FRKSNLKPFERDISTEIYQAGSTPCNGVEGFNCYFPLQSYGFQPTNGVGYQPYRVVVLSFELLHA
PATVCGPKKSTNLVKNKCVNFNFNGLTGTGVLTESNKKFLPFQQFGRDIADTTDAVRDPQTLEIL
DITPCSFGGVSVITPGTNTSNQVAVLYQNVNCTEVPVAIHADQLTPTWRVYSTGSNVFQTRAGCL
IGAEHVNNSYECDIPIGAGICASYQTQTNSPRRARSVASQSIIAYTMSLGAENSVAYSNNSIAIP
TNFTISVTTEILPVSMTKTSVDCTMYICGDSTECSNLLLQYGSFCTQLNRALTGIAVEQDKNTQE
VFAQVKQIYKTPPIKDFGGFNFSQILPDPSKPSKRSFIEDLLFNKVTLADAGFIKQYGDCLGDIA
ARDLICAQKFNGLTVLPPLLTDEMIAQYTSALLAGTITCGWTFGAGACLQIPFAMQMAYRFNGIG
VTQNVLYENQKLIANQFNSAIGKIQDSLSSTPSALGKLQDVVNQNAQALNTLVKQLSSNFGAISS
VLNDILSRLDKVEAEVQIDRLITGRLQSLQTYVTQQLIRAAEIRASANLAATKMSECVLGQSKRV
DFCGKGYHLMSFPQSAPHGVVFLHVTYVPAQEKNFTTAPAICHDGKAHFPREGVFVSNGTHWFVT
QRNFYEPQIITTDNTFVSGNCDVVIGIVNNTVYDPLQPELDSFKEELDKYFKNHTSPDVDLGDIS
GINASVVNIQKEIDRLNEVAKNLNESLIDLQELGKYEQYIKWPWYIWLGFIAGLIAIVMVTIMLC
CMTSCCSCLKGCCSCGSCCKFDEDDSEPVLKGVKLHYT
SEQ ID NO 263: SEQ ID NO 1 + A942P + T572I +
N532P
MFVFLVLLPLVSSQCVNLTTRTQLPPAYTNSFTRGVYYPDKVFRSSVLHSTQDLFLPFFSNVTWF
HAIHVSGTNGTKRFDNPVLPFNDGVYFASTEKSNIIRGWIFGTTLDSKTQSLLIVNNATNVVIKV
CEFQFCNDPFLGVYYHKNNKSWMESEFRVYSSANNCTFEYVSQPFLMDLEGKQGNFKNLREFVFK
NIDGYFKIYSKHTPINLVRDLPQGFSALEPLVDLPIGINITRFQTLLALHRSYLTPGDSSSGWTA
GAAAYYVGYLQPRTFLLKYNENGTITDAVDCALDPLSETKCTLKSFTVEKGIYQTSNFRVQPTES
IVRFPNITNLCPFGEVFNATRFASVYAWNRKRISNCVADYSVLYNSASFSTFKCYGVSPTKLNDL
CFTNVYADSFVIRGDEVRQIAPGQTGKIADYNYKLPDDFTGCVIAWNSNNLDSKVGGNYNYLYRL
FRKSNLKPFERDISTEIYQAGSTPCNGVEGFNCYFPLQSYGFQPTNGVGYQPYRVVVLSFELLHA
PATVCGPKKSTPLVKNKCVNFNFNGLTGTGVLTESNKKFLPFQQFGRDIADITDAVRDPQTLEIL
DITPCSFGGVSVITPGTNTSNQVAVLYQDVNCTEVPVAIHADQLTPTWRVYSTGSNVFQTRAGCL
IGAEHVNNSYECDIPIGAGICASYQTQTNSPRRARSVASQSIIAYTMSLGAENSVAYSNNSIAIP
TNFTISVTTEILPVSMTKTSVDCTMYICGDSTECSNLLLQYGSFCTQLNRALTGIAVEQDKNTQE
VFAQVKQIYKTPPIKDFGGFNFSQILPDPSKPSKRSFIEDLLFNKVTLADAGFIKQYGDCLGDIA
ARDLICAQKFNGLTVLPPLLTDEMIAQYTSALLAGTITSGWTFGAGAALQIPFAMQMAYRFNGIG
VTQNVLYENQKLIANQFNSAIGKIQDSLSSTPSALGKLQDVVNQNAQALNTLVKQLSSNFGAISS
VLNDILSRLDKVEAEVQIDRLITGRLQSLQTYVTQQLIRAAEIRASANLAATKMSECVLGQSKRV
DFCGKGYHLMSFPQSAPHGVVFLHVTYVPAQEKNFTTAPAICHDGKAHFPREGVFVSNGTHWFVT
QRNFYEPQIITTDNTFVSGNCDVVIGIVNNTVYDPLQPELDSFKEELDKYFKNHTSPDVDLGDIS
GINASVVNIQKEIDRLNEVAKNLNESLIDLQELGKYEQYIKWPWYIWLGFIAGLIAIVMVTIMLC
CMTSCCSCLKGCCSCGSCCKFDEDDSEPVLKGVKLHYT
SEQ ID NO 264: SEQ ID NO 1 + A942P + T572I +
G880C + F888C
MFVFLVLLPLVSSQCVNLTTRTQLPPAYTNSFTRGVYYPDKVFRSSVLHSTQDLFLPFFSNVTWF
HAIHVSGTNGTKRFDNPVLPFNDGVYFASTEKSNIIRGWIFGTTLDSKTQSLLIVNNATNVVIKV
CEFQFCNDPFLGVYYHKNNKSWMESEFRVYSSANNCTFEYVSQPFLMDLEGKQGNFKNLREFVFK
NIDGYFKIYSKHTPINLVRDLPQGFSALEPLVDLPIGINITRFQTLLALHRSYLTPGDSSSGWTA
GAAAYYVGYLQPRTFLLKYNENGTITDAVDCALDPLSETKCTLKSFTVEKGIYQTSNFRVQPTES
IVRFPNITNLCPFGEVFNATRFASVYAWNRKRISNCVADYSVLYNSASFSTFKCYGVSPTKLNDL
CFTNVYADSFVIRGDEVRQIAPGQTGKIADYNYKLPDDFTGCVIAWNSNNLDSKVGGNYNYLYRL
FRKSNLKPFERDISTEIYQAGSTPCNGVEGFNCYFPLQSYGFQPTNGVGYQPYRVVVLSFELLHA
PATVCGPKKSTNLVKNKCVNFNFNGLTGTGVLTESNKKFLPFQQFGRDIADITDAVRDPQTLEIL
DITPCSFGGVSVITPGTNTSNQVAVLYQDVNCTEVPVAIHADQLTPTWRVYSTGSNVFQTRAGCL
IGAEHVNNSYECDIPIGAGICASYQTQTNSPRRARSVASQSIIAYTMSLGAENSVAYSNNSIAIP
TNFTISVTTEILPVSMTKTSVDCTMYICGDSTECSNLLLQYGSFCTQLNRALTGIAVEQDKNTQE
VFAQVKQIYKTPPIKDFGGFNFSQILPDPSKPSKRSFIEDLLFNKVTLADAGFIKQYGDCLGDIA
ARDLICAQKFNGLTVLPPLLTDEMIAQYTSALLACTITSGWTCGAGAALQIPFAMQMAYRFNGIG
VTQNVLYENQKLIANQFNSAIGKIQDSLSSTPSALGKLQDVVNQNAQALNTLVKQLSSNFGAISS
VLNDILSRLDKVEAEVQIDRLITGRLQSLQTYVTQQLIRAAEIRASANLAATKMSECVLGQSKRV
DFCGKGYHLMSFPQSAPHGVVFLHVTYVPAQEKNFTTAPAICHDGKAHFPREGVFVSNGTHWFVT
QRNFYEPQIITTDNTFVSGNCDVVIGIVNNTVYDPLQPELDSFKEELDKYFKNHTSPDVDLGDIS
GINASVVNIQKEIDRLNEVAKNLNESLIDLQELGKYEQYIKWPWYIWLGFIAGLIAIVMVTIMLC
CMTSCCSCLKGCCSCGSCCKFDEDDSEPVLKGVKLHYT
SEQ ID NO 265: SEQ ID NO 1 + A942P + T572I +
S884C + A893C
MFVFLVLLPLVSSQCVNLTTRTQLPPAYTNSFTRGVYYPDKVFRSSVLHSTQDLFLPFFSNVTWF
HAIHVSGTNGTKRFDNPVLPFNDGVYFASTEKSNIIRGWIFGTTLDSKTQSLLIVNNATNVVIKV
CEFQFCNDPFLGVYYHKNNKSWMESEFRVYSSANNCTFEYVSQPFLMDLEGKQGNFKNLREFVFK
NIDGYFKIYSKHTPINLVRDLPQGFSALEPLVDLPIGINITRFQTLLALHRSYLTPGDSSSGWTA
GAAAYYVGYLQPRTFLLKYNENGTITDAVDCALDPLSETKCTLKSFTVEKGIYQTSNFRVQPTES
IVRFPNITNLCPFGEVFNATRFASVYAWNRKRISNCVADYSVLYNSASFSTFKCYGVSPTKLNDL
CFTNVYADSFVIRGDEVRQIAPGQTGKIADYNYKLPDDFTGCVIAWNSNNLDSKVGGNYNYLYRL
FRKSNLKPFERDISTEIYQAGSTPCNGVEGFNCYFPLQSYGFQPTNGVGYQPYRVVVLSFELLHA
PATVCGPKKSTNLVKNKCVNFNFNGLTGTGVLTESNKKFLPFQQFGRDIADITDAVRDPQTLEIL
DITPCSFGGVSVITPGTNTSNQVAVLYQDVNCTEVPVAIHADQLTPTWRVYSTGSNVFQTRAGCL
IGAEHVNNSYECDIPIGAGICASYQTQTNSPRRARSVASQSIIAYTMSLGAENSVAYSNNSIAIP
TNFTISVTTEILPVSMTKTSVDCTMYICGDSTECSNLLLQYGSFCTQLNRALTGIAVEQDKNTQE
VFAQVKQIYKTPPIKDFGGFNFSQILPDPSKPSKRSFIEDLLFNKVTLADAGFIKQYGDCLGDIA
ARDLICAQKFNGLTVLPPLLTDEMIAQYTSALLAGTITCGWTFGAGACLQIPFAMQMAYRFNGIG
VTQNVLYENQKLIANQFNSAIGKIQDSLSSTPSALGKLQDVVNQNAQALNTLVKQLSSNFGAISS
VLNDILSRLDKVEAEVQIDRLITGRLQSLQTYVTQQLIRAAEIRASANLAATKMSECVLGQSKRV
DFCGKGYHLMSFPQSAPHGVVFLHVTYVPAQEKNFTTAPAICHDGKAHFPREGVFVSNGTHWFVT
QRNFYEPQIITTDNTFVSGNCDVVIGIVNNTVYDPLQPELDSFKEELDKYFKNHTSPDVDLGDIS
GINASVVNIQKEIDRLNEVAKNLNESLIDLQELGKYEQYIKWPWYIWLGFIAGLIAIVMVTIMLC
CMTSCCSCLKGCCSCGSCCKFDEDDSEPVLKGVKLHYT
SEQ ID NO 266: SEQ ID NO 1 + A942P + N532P + G880C + F888C
MFVFLVLLPLVSSQCVNLTTRTQLPPAYTNSFTRGVYYPDKVFRSSVLHSTQDLFLPFFSNVTWF
HAIHVSGTNGTKRFDNPVLPFNDGVYFASTEKSNIIRGWIFGTTLDSKTQSLLIVNNATNVVIKV
CEFQFCNDPFLGVYYHKNNKSWMESEFRVYSSANNCTFEYVSQPFLMDLEGKQGNFKNLREFVFK
NIDGYFKIYSKHTPINLVRDLPQGFSALEPLVDLPIGINITRFQTLLALHRSYLTPGDSSSGWTA
GAAAYYVGYLQPRTFLLKYNENGTITDAVDCALDPLSETKCTLKSFTVEKGIYQTSNFRVQPTES
IVRFPNITNLCPFGEVFNATRFASVYAWNRKRISNCVADYSVLYNSASFSTFKCYGVSPTKLNDL
CFTNVYADSFVIRGDEVRQIAPGQTGKIADYNYKLPDDFTGCVIAWNSNNLDSKVGGNYNYLYRL
FRKSNLKPFERDISTEIYQAGSTPCNGVEGFNCYFPLQSYGFQPTNGVGYQPYRVVVLSFELLHA
PATVCGPKKSTPLVKNKCVNFNFNGLTGTGVLTESNKKFLPFQQFGRDIADTTDAVRDPQTLEIL
DITPCSFGGVSVITPGTNTSNQVAVLYQDVNCTEVPVAIHADQLTPTWRVYSTGSNVFQTRAGCL
IGAEHVNNSYECDIPIGAGICASYQTQTNSPRRARSVASQSIIAYTMSLGAENSVAYSNNSIAIP
TNFTISVTTEILPVSMTKTSVDCTMYICGDSTECSNLLLQYGSFCTQLNRALTGIAVEQDKNTQE
VFAQVKQIYKTPPIKDFGGFNFSQILPDPSKPSKRSFIEDLLFNKVTLADAGFIKQYGDCLGDIA
ARDLICAQKFNGLTVLPPLLTDEMIAQYTSALLACTITSGWTCGAGAALQIPFAMQMAYRFNGIG
VTQNVLYENQKLIANQFNSAIGKIQDSLSSTPSALGKLQDVVNQNAQALNTLVKQLSSNFGAISS
VLNDILSRLDKVEAEVQIDRLITGRLQSLQTYVTQQLIRAAEIRASANLAATKMSECVLGQSKRV
DFCGKGYHLMSFPQSAPHGVVFLHVTYVPAQEKNFTTAPAICHDGKAHFPREGVFVSNGTHWFVT
QRNFYEPQIITTDNTFVSGNCDVVIGIVNNTVYDPLQPELDSFKEELDKYFKNHTSPDVDLGDIS
GINASVVNIQKEIDRLNEVAKNLNESLIDLQELGKYEQYIKWPWYIWLGFIAGLIAIVMVTIMLC
CMTSCCSCLKGCCSCGSCCKFDEDDSEPVLKGVKLHYT
SEQ ID NO 267: SEQ ID NO 1 + A942P + N532P + S884C + A893C
MFVFLVLLPLVSSQCVNLTTRTQLPPAYTNSFTRGVYYPDKVFRSSVLHSTQDLFLPFFSNVTWF
HAIHVSGTNGTKRFDNPVLPFNDGVYFASTEKSNIIRGWIFGTTLDSKTQSLLIVNNATNVVIKV
CEFQFCNDPFLGVYYHKNNKSWMESEFRVYSSANNCTFEYVSQPFLMDLEGKQGNFKNLREFVFK
NIDGYFKIYSKHTPINLVRDLPQGFSALEPLVDLPIGINITRFQTLLALHRSYLTPGDSSSGWTA
GAAAYYVGYLQPRTFLLKYNENGTITDAVDCALDPLSETKCTLKSFTVEKGIYQTSNFRVQPTES
IVRFPNITNLCPFGEVFNATRFASVYAWNRKRISNCVADYSVLYNSASFSTFKCYGVSPTKLNDL
CFTNVYADSFVIRGDEVRQIAPGQTGKIADYNYKLPDDFTGCVIAWNSNNLDSKVGGNYNYLYRL
FRKSNLKPFERDISTEIYQAGSTPCNGVEGFNCYFPLQSYGFQPTNGVGYQPYRVVVLSFELLHA
PATVCGPKKSTPLVKNKCVNFNFNGLTGTGVLTESNKKFLPFQQFGRDIADTTDAVRDPQTLEIL
DITPCSFGGVSVITPGTNTSNQVAVLYQDVNCTEVPVAIHADQLTPTWRVYSTGSNVFQTRAGCL
IGAEHVNNSYECDIPIGAGICASYQTQTNSPRRARSVASQSIIAYTMSLGAENSVAYSNNSIAIP
TNFTISVTTEILPVSMTKTSVDCTMYICGDSTECSNLLLQYGSFCTQLNRALTGIAVEQDKNTQE
VFAQVKQIYKTPPIKDFGGFNFSQILPDPSKPSKRSFIEDLLFNKVTLADAGFIKQYGDCLGDIA
ARDLICAQKFNGLTVLPPLLTDEMIAQYTSALLAGTITCGWTFGAGACLQIPFAMQMAYRFNGIG
VTQNVLYENQKLIANQFNSAIGKIQDSLSSTPSALGKLQDVVNQNAQALNTLVKQLSSNFGAISS
VLNDILSRLDKVEAEVQIDRLITGRLQSLQTYVTQQLIRAAEIRASANLAATKMSECVLGQSKRV
DFCGKGYHLMSFPQSAPHGVVFLHVTYVPAQEKNFTTAPAICHDGKAHFPREGVFVSNGTHWFVT
QRNFYEPQIITTDNTFVSGNCDVVIGIVNNTVYDPLQPELDSFKEELDKYFKNHTSPDVDLGDIS
GINASVVNIQKEIDRLNEVAKNLNESLIDLQELGKYEQYIKWPWYIWLGFIAGLIAIVMVTIMLC
CMTSCCSCLKGCCSCGSCCKFDEDDSEPVLKGVKLHYT
SEQ ID NO 268: SEQ ID NO 1 + A892P + D614N + T572I
MFVFLVLLPLVSSQCVNLTTRTQLPPAYTNSFTRGVYYPDKVFRSSVLHSTQDLFLPFFSNVTWF
HAIHVSGTNGTKRFDNPVLPFNDGVYFASTEKSNIIRGWIFGTTLDSKTQSLLIVNNATNVVIKV
CEFQFCNDPFLGVYYHKNNKSWMESEFRVYSSANNCTFEYVSQPFLMDLEGKQGNFKNLREFVFK
NIDGYFKIYSKHTPINLVRDLPQGFSALEPLVDLPIGINITRFQTLLALHRSYLTPGDSSSGWTA
GAAAYYVGYLQPRTFLLKYNENGTITDAVDCALDPLSETKCTLKSFTVEKGIYQTSNFRVQPTES
IVRFPNITNLCPFGEVFNATRFASVYAWNRKRISNCVADYSVLYNSASFSTFKCYGVSPTKLNDL
CFTNVYADSFVIRGDEVRQIAPGQTGKIADYNYKLPDDFTGCVIAWNSNNLDSKVGGNYNYLYRL
FRKSNLKPFERDISTEIYQAGSTPCNGVEGFNCYFPLQSYGFQPTNGVGYQPYRVVVLSFELLHA
PATVCGPKKSTNLVKNKCVNFNFNGLTGTGVLTESNKKFLPFQQFGRDIADITDAVRDPQTLEIL
DITPCSFGGVSVITPGTNTSNQVAVLYQNVNCTEVPVAIHADQLTPTWRVYSTGSNVFQTRAGCL
IGAEHVNNSYECDIPIGAGICASYQTQTNSPRRARSVASQSIIAYTMSLGAENSVAYSNNSIAIP
TNFTISVTTEILPVSMTKTSVDCTMYICGDSTECSNLLLQYGSFCTQLNRALTGIAVEQDKNTQE
VFAQVKQIYKTPPIKDFGGFNFSQILPDPSKPSKRSFIEDLLFNKVTLADAGFIKQYGDCLGDIA
ARDLICAQKFNGLTVLPPLLTDEMIAQYTSALLAGTITSGWTFGAGPALQIPFAMQMAYRFNGIG
VTQNVLYENQKLIANQFNSAIGKIQDSLSSTASALGKLQDVVNQNAQALNTLVKQLSSNFGAISS
VLNDILSRLDKVEAEVQIDRLITGRLQSLQTYVTQQLIRAAEIRASANLAATKMSECVLGQSKRV
DFCGKGYHLMSFPQSAPHGVVFLHVTYVPAQEKNFTTAPAICHDGKAHFPREGVFVSNGTHWFVT
QRNFYEPQIITTDNTFVSGNCDVVIGIVNNTVYDPLQPELDSFKEELDKYFKNHTSPDVDLGDIS
GINASVVNIQKEIDRLNEVAKNLNESLIDLQELGKYEQYIKWPWYIWLGFIAGLIAIVMVTIMLC
CMTSCCSCLKGCCSCGSCCKFDEDDSEPVLKGVKLHYT
SEQ ID NO 269: SEQ ID NO 1 + A892P + D614N + N532P
MFVFLVLLPLVSSQCVNLTTRTQLPPAYTNSFTRGVYYPDKVFRSSVLHSTQDLFLPFFSNVTWF
HAIHVSGTNGTKRFDNPVLPFNDGVYFASTEKSNIIRGWIFGTTLDSKTQSLLIVNNATNVVIKV
CEFQFCNDPFLGVYYHKNNKSWMESEFRVYSSANNCTFEYVSQPFLMDLEGKQGNFKNLREFVFK
NIDGYFKIYSKHTPINLVRDLPQGFSALEPLVDLPIGINITRFQTLLALHRSYLTPGDSSSGWTA
GAAAYYVGYLQPRTFLLKYNENGTITDAVDCALDPLSETKCTLKSFTVEKGIYQTSNFRVQPTES
IVRFPNITNLCPFGEVFNATRFASVYAWNRKRISNCVADYSVLYNSASFSTFKCYGVSPTKLNDL
CFTNVYADSFVIRGDEVRQIAPGQTGKIADYNYKLPDDFTGCVIAWNSNNLDSKVGGNYNYLYRL
FRKSNLKPFERDISTEIYQAGSTPCNGVEGFNCYFPLQSYGFQPTNGVGYQPYRVVVLSFELLHA
PATVCGPKKSTPLVKNKCVNFNFNGLTGTGVLTESNKKFLPFQQFGRDIADTTDAVRDPQTLEIL
DITPCSFGGVSVITPGTNTSNQVAVLYQNVNCTEVPVAIHADQLTPTWRVYSTGSNVFQTRAGCL
IGAEHVNNSYECDIPIGAGICASYQTQTNSPRRARSVASQSIIAYTMSLGAENSVAYSNNSIAIP
TNFTISVTTEILPVSMTKTSVDCTMYICGDSTECSNLLLQYGSFCTQLNRALTGIAVEQDKNTQE
VFAQVKQIYKTPPIKDFGGFNFSQILPDPSKPSKRSFIEDLLFNKVTLADAGFIKQYGDCLGDIA
ARDLICAQKFNGLTVLPPLLTDEMIAQYTSALLAGTITSGWTFGAGPALQIPFAMQMAYRFNGIG
VTQNVLYENQKLIANQFNSAIGKIQDSLSSTASALGKLQDVVNQNAQALNTLVKQLSSNFGAISS
VLNDILSRLDKVEAEVQIDRLITGRLQSLQTYVTQQLIRAAEIRASANLAATKMSECVLGQSKRV
DFCGKGYHLMSFPQSAPHGVVFLHVTYVPAQEKNFTTAPAICHDGKAHFPREGVFVSNGTHWFVT
QRNFYEPQIITTDNTFVSGNCDVVIGIVNNTVYDPLQPELDSFKEELDKYFKNHTSPDVDLGDIS
GINASVVNIQKEIDRLNEVAKNLNESLIDLQELGKYEQYIKWPWYIWLGFIAGLIAIVMVTIMLC
CMTSCCSCLKGCCSCGSCCKFDEDDSEPVLKGVKLHYT
SEQ ID NO 270: SEQ ID NO 1 + A892P + D614N + G880C + F888C
MFVFLVLLPLVSSQCVNLTTRTQLPPAYTNSFTRGVYYPDKVFRSSVLHSTQDLFLPFFSNVTWF
HAIHVSGTNGTKRFDNPVLPFNDGVYFASTEKSNIIRGWIFGTTLDSKTQSLLIVNNATNVVIKV
CEFQFCNDPFLGVYYHKNNKSWMESEFRVYSSANNCTFEYVSQPFLMDLEGKQGNFKNLREFVFK
NIDGYFKIYSKHTPINLVRDLPQGFSALEPLVDLPIGINITRFQTLLALHRSYLTPGDSSSGWTA
GAAAYYVGYLQPRTFLLKYNENGTITDAVDCALDPLSETKCTLKSFTVEKGIYQTSNFRVQPTES
IVRFPNITNLCPFGEVFNATRFASVYAWNRKRISNCVADYSVLYNSASFSTFKCYGVSPTKLNDL
CFTNVYADSFVIRGDEVRQIAPGQTGKIADYNYKLPDDFTGCVIAWNSNNLDSKVGGNYNYLYRL
FRKSNLKPFERDISTEIYQAGSTPCNGVEGFNCYFPLQSYGFQPTNGVGYQPYRVVVLSFELLHA
PATVCGPKKSTNLVKNKCVNFNFNGLTGTGVLTESNKKFLPFQQFGRDIADTTDAVRDPQTLEIL
DITPCSFGGVSVITPGTNTSNQVAVLYQNVNCTEVPVAIHADQLTPTWRVYSTGSNVFQTRAGCL
IGAEHVNNSYECDIPIGAGICASYQTQTNSPRRARSVASQSIIAYTMSLGAENSVAYSNNSIAIP
TNFTISVTTEILPVSMTKTSVDCTMYICGDSTECSNLLLQYGSFCTQLNRALTGIAVEQDKNTQE
VFAQVKQIYKTPPIKDFGGFNFSQILPDPSKPSKRSFIEDLLFNKVTLADAGFIKQYGDCLGDIA
ARDLICAQKFNGLTVLPPLLTDEMIAQYTSALLACTITSGWTCGAGPALQIPFAMQMAYRFNGIG
VTQNVLYENQKLIANQFNSAIGKIQDSLSSTASALGKLQDVVNQNAQALNTLVKQLSSNFGAISS
VLNDILSRLDKVEAEVQIDRLITGRLQSLQTYVTQQLIRAAEIRASANLAATKMSECVLGQSKRV
DFCGKGYHLMSFPQSAPHGVVFLHVTYVPAQEKNFTTAPAICHDGKAHFPREGVFVSNGTHWFVT
QRNFYEPQIITTDNTFVSGNCDVVIGIVNNTVYDPLQPELDSFKEELDKYFKNHTSPDVDLGDIS
GINASVVNIQKEIDRLNEVAKNLNESLIDLQELGKYEQYIKWPWYIWLGFIAGLIAIVMVTIMLC
CMTSCCSCLKGCCSCGSCCKFDEDDSEPVLKGVKLHYT
SEQ ID NO 271: SEQ ID NO 1 + A892P + D614N + S884C + A893C
MFVFLVLLPLVSSQCVNLTTRTQLPPAYTNSFTRGVYYPDKVFRSSVLHSTQDLFLPFFSNVTWF
HAIHVSGTNGTKRFDNPVLPFNDGVYFASTEKSNIIRGWIFGTTLDSKTQSLLIVNNATNVVIKV
CEFQFCNDPFLGVYYHKNNKSWMESEFRVYSSANNCTFEYVSQPFLMDLEGKQGNFKNLREFVFK
NIDGYFKIYSKHTPINLVRDLPQGFSALEPLVDLPIGINITRFQTLLALHRSYLTPGDSSSGWTA
GAAAYYVGYLQPRTFLLKYNENGTITDAVDCALDPLSETKCTLKSFTVEKGIYQTSNFRVQPTES
IVRFPNITNLCPFGEVFNATRFASVYAWNRKRISNCVADYSVLYNSASFSTFKCYGVSPTKLNDL
CFTNVYADSFVIRGDEVRQIAPGQTGKIADYNYKLPDDFTGCVIAWNSNNLDSKVGGNYNYLYRL
FRKSNLKPFERDISTEIYQAGSTPCNGVEGFNCYFPLQSYGFQPTNGVGYQPYRVVVLSFELLHA
PATVCGPKKSTNLVKNKCVNFNFNGLTGTGVLTESNKKFLPFQQFGRDIADTTDAVRDPQTLEIL
DITPCSFGGVSVITPGTNTSNQVAVLYQNVNCTEVPVAIHADQLTPTWRVYSTGSNVFQTRAGCL
IGAEHVNNSYECDIPIGAGICASYQTQTNSPRRARSVASQSIIAYTMSLGAENSVAYSNNSIAIP
TNFTISVTTEILPVSMTKTSVDCTMYICGDSTECSNLLLQYGSFCTQLNRALTGIAVEQDKNTQE
VFAQVKQIYKTPPIKDFGGFNFSQILPDPSKPSKRSFIEDLLFNKVTLADAGFIKQYGDCLGDIA
ARDLICAQKFNGLTVLPPLLTDEMIAQYTSALLAGTITCGWTFGAGPCLQIPFAMQMAYRFNGIG
VTQNVLYENQKLIANQFNSAIGKIQDSLSSTASALGKLQDVVNQNAQALNTLVKQLSSNFGAISS
VLNDILSRLDKVEAEVQIDRLITGRLQSLQTYVTQQLIRAAEIRASANLAATKMSECVLGQSKRV
DFCGKGYHLMSFPQSAPHGVVFLHVTYVPAQEKNFTTAPAICHDGKAHFPREGVFVSNGTHWFVT
QRNFYEPQIITTDNTFVSGNCDVVIGIVNNTVYDPLQPELDSFKEELDKYFKNHTSPDVDLGDIS
GINASVVNIQKEIDRLNEVAKNLNESLIDLQELGKYEQYIKWPWYIWLGFIAGLIAIVMVTIMLC
CMTSCCSCLKGCCSCGSCCKFDEDDSEPVLKGVKLHYT
SEQ ID NO 272: SEQ ID NO 1 + A892P + T572I +
N532P
MFVFLVLLPLVSSQCVNLTTRTQLPPAYTNSFTRGVYYPDKVFRSSVLHSTQDLFLPFFSNVTWF
HAIHVSGTNGTKRFDNPVLPFNDGVYFASTEKSNIIRGWIFGTTLDSKTQSLLIVNNATNVVIKV
CEFQFCNDPFLGVYYHKNNKSWMESEFRVYSSANNCTFEYVSQPFLMDLEGKQGNFKNLREFVFK
NIDGYFKIYSKHTPINLVRDLPQGFSALEPLVDLPIGINITRFQTLLALHRSYLTPGDSSSGWTA
GAAAYYVGYLQPRTFLLKYNENGTITDAVDCALDPLSETKCTLKSFTVEKGIYQTSNFRVQPTES
IVRFPNITNLCPFGEVFNATRFASVYAWNRKRISNCVADYSVLYNSASFSTFKCYGVSPTKLNDL
CFTNVYADSFVIRGDEVRQIAPGQTGKIADYNYKLPDDFTGCVIAWNSNNLDSKVGGNYNYLYRL
FRKSNLKPFERDISTEIYQAGSTPCNGVEGFNCYFPLQSYGFQPTNGVGYQPYRVVVLSFELLHA
PATVCGPKKSTPLVKNKCVNFNFNGLTGTGVLTESNKKFLPFQQFGRDIADITDAVRDPQTLEIL
DITPCSFGGVSVITPGTNTSNQVAVLYQDVNCTEVPVAIHADQLTPTWRVYSTGSNVFQTRAGCL
IGAEHVNNSYECDIPIGAGICASYQTQTNSPRRARSVASQSIIAYTMSLGAENSVAYSNNSIAIP
TNFTISVTTEILPVSMTKTSVDCTMYICGDSTECSNLLLQYGSFCTQLNRALTGIAVEQDKNTQE
VFAQVKQIYKTPPIKDFGGFNFSQILPDPSKPSKRSFIEDLLFNKVTLADAGFIKQYGDCLGDIA
ARDLICAQKFNGLTVLPPLLTDEMIAQYTSALLAGTITSGWTFGAGPALQIPFAMQMAYRFNGIG
VTQNVLYENQKLIANQFNSAIGKIQDSLSSTASALGKLQDVVNQNAQALNTLVKQLSSNFGAISS
VLNDILSRLDKVEAEVQIDRLITGRLQSLQTYVTQQLIRAAEIRASANLAATKMSECVLGQSKRV
DFCGKGYHLMSFPQSAPHGVVFLHVTYVPAQEKNFTTAPAICHDGKAHFPREGVFVSNGTHWFVT
QRNFYEPQIITTDNTFVSGNCDVVIGIVNNTVYDPLQPELDSFKEELDKYFKNHTSPDVDLGDIS
GINASVVNIQKEIDRLNEVAKNLNESLIDLQELGKYEQYIKWPWYIWLGFIAGLIAIVMVTIMLC
CMTSCCSCLKGCCSCGSCCKFDEDDSEPVLKGVKLHYT
SEQ ID NO 273: SEQ ID NO 1 + A892P + T572I +
G880C + F888C
MFVFLVLLPLVSSQCVNLTTRTQLPPAYTNSFTRGVYYPDKVFRSSVLHSTQDLFLPFFSNVTWF
HAIHVSGTNGTKRFDNPVLPFNDGVYFASTEKSNIIRGWIFGTTLDSKTQSLLIVNNATNVVIKV
CEFQFCNDPFLGVYYHKNNKSWMESEFRVYSSANNCTFEYVSQPFLMDLEGKQGNFKNLREFVFK
NIDGYFKIYSKHTPINLVRDLPQGFSALEPLVDLPIGINITRFQTLLALHRSYLTPGDSSSGWTA
GAAAYYVGYLQPRTFLLKYNENGTITDAVDCALDPLSETKCTLKSFTVEKGIYQTSNFRVQPTES
IVRFPNITNLCPFGEVFNATRFASVYAWNRKRISNCVADYSVLYNSASFSTFKCYGVSPTKLNDL
CFTNVYADSFVIRGDEVRQIAPGQTGKIADYNYKLPDDFTGCVIAWNSNNLDSKVGGNYNYLYRL
FRKSNLKPFERDISTEIYQAGSTPCNGVEGFNCYFPLQSYGFQPTNGVGYQPYRVVVLSFELLHA
PATVCGPKKSTNLVKNKCVNFNFNGLTGTGVLTESNKKFLPFQQFGRDIADITDAVRDPQTLEIL
DITPCSFGGVSVITPGTNTSNQVAVLYQDVNCTEVPVAIHADQLTPTWRVYSTGSNVFQTRAGCL
IGAEHVNNSYECDIPIGAGICASYQTQTNSPRRARSVASQSIIAYTMSLGAENSVAYSNNSIAIP
TNFTISVTTEILPVSMTKTSVDCTMYICGDSTECSNLLLQYGSFCTQLNRALTGIAVEQDKNTQE
VFAQVKQIYKTPPIKDFGGFNFSQILPDPSKPSKRSFIEDLLFNKVTLADAGFIKQYGDCLGDIA
ARDLICAQKFNGLTVLPPLLTDEMIAQYTSALLACTITSGWTCGAGPALQIPFAMQMAYRFNGIG
VTQNVLYENQKLIANQFNSAIGKIQDSLSSTASALGKLQDVVNQNAQALNTLVKQLSSNFGAISS
VLNDILSRLDKVEAEVQIDRLITGRLQSLQTYVTQQLIRAAEIRASANLAATKMSECVLGQSKRV
DFCGKGYHLMSFPQSAPHGVVFLHVTYVPAQEKNFTTAPAICHDGKAHFPREGVFVSNGTHWFVT
QRNFYEPQIITTDNTFVSGNCDVVIGIVNNTVYDPLQPELDSFKEELDKYFKNHTSPDVDLGDIS
GINASVVNIQKEIDRLNEVAKNLNESLIDLQELGKYEQYIKWPWYIWLGFIAGLIAIVMVTIMLC
CMTSCCSCLKGCCSCGSCCKFDEDDSEPVLKGVKLHYT
SEQ ID NO 274: SEQ ID NO 1 + A892P + T572I +
S884C + A893C
MFVFLVLLPLVSSQCVNLTTRTQLPPAYTNSFTRGVYYPDKVFRSSVLHSTQDLFLPFFSNVTWF
HAIHVSGTNGTKRFDNPVLPFNDGVYFASTEKSNIIRGWIFGTTLDSKTQSLLIVNNATNVVIKV
CEFQFCNDPFLGVYYHKNNKSWMESEFRVYSSANNCTFEYVSQPFLMDLEGKQGNFKNLREFVFK
NIDGYFKIYSKHTPINLVRDLPQGFSALEPLVDLPIGINITRFQTLLALHRSYLTPGDSSSGWTA
GAAAYYVGYLQPRTFLLKYNENGTITDAVDCALDPLSETKCTLKSFTVEKGIYQTSNFRVQPTES
IVRFPNITNLCPFGEVFNATRFASVYAWNRKRISNCVADYSVLYNSASFSTFKCYGVSPTKLNDL
CFTNVYADSFVIRGDEVRQIAPGQTGKIADYNYKLPDDFTGCVIAWNSNNLDSKVGGNYNYLYRL
FRKSNLKPFERDISTEIYQAGSTPCNGVEGFNCYFPLQSYGFQPTNGVGYQPYRVVVLSFELLHA
PATVCGPKKSTNLVKNKCVNFNFNGLTGTGVLTESNKKFLPFQQFGRDIADITDAVRDPQTLEIL
DITPCSFGGVSVITPGTNTSNQVAVLYQDVNCTEVPVAIHADQLTPTWRVYSTGSNVFQTRAGCL
IGAEHVNNSYECDIPIGAGICASYQTQTNSPRRARSVASQSIIAYTMSLGAENSVAYSNNSIAIP
TNFTISVTTEILPVSMTKTSVDCTMYICGDSTECSNLLLQYGSFCTQLNRALTGIAVEQDKNTQE
VFAQVKQIYKTPPIKDFGGFNFSQILPDPSKPSKRSFIEDLLFNKVTLADAGFIKQYGDCLGDIA
ARDLICAQKFNGLTVLPPLLTDEMIAQYTSALLAGTITCGWTFGAGPCLQIPFAMQMAYRFNGIG
VTQNVLYENQKLIANQFNSAIGKIQDSLSSTASALGKLQDVVNQNAQALNTLVKQLSSNFGAISS
VLNDILSRLDKVEAEVQIDRLITGRLQSLQTYVTQQLIRAAEIRASANLAATKMSECVLGQSKRV
DFCGKGYHLMSFPQSAPHGVVFLHVTYVPAQEKNFTTAPAICHDGKAHFPREGVFVSNGTHWFVT
QRNFYEPQIITTDNTFVSGNCDVVIGIVNNTVYDPLQPELDSFKEELDKYFKNHTSPDVDLGDIS
GINASVVNIQKEIDRLNEVAKNLNESLIDLQELGKYEQYIKWPWYIWLGFIAGLIAIVMVTIMLC
CMTSCCSCLKGCCSCGSCCKFDEDDSEPVLKGVKLHYT
SEQ ID NO 275: SEQ ID NO 1 + A892P + N532P + G880C + F888C
MFVFLVLLPLVSSQCVNLTTRTQLPPAYTNSFTRGVYYPDKVFRSSVLHSTQDLFLPFFSNVTWF
HAIHVSGTNGTKRFDNPVLPFNDGVYFASTEKSNIIRGWIFGTTLDSKTQSLLIVNNATNVVIKV
CEFQFCNDPFLGVYYHKNNKSWMESEFRVYSSANNCTFEYVSQPFLMDLEGKQGNFKNLREFVFK
NIDGYFKIYSKHTPINLVRDLPQGFSALEPLVDLPIGINITRFQTLLALHRSYLTPGDSSSGWTA
GAAAYYVGYLQPRTFLLKYNENGTITDAVDCALDPLSETKCTLKSFTVEKGIYQTSNFRVQPTES
IVRFPNITNLCPFGEVFNATRFASVYAWNRKRISNCVADYSVLYNSASFSTFKCYGVSPTKLNDL
CFTNVYADSFVIRGDEVRQIAPGQTGKIADYNYKLPDDFTGCVIAWNSNNLDSKVGGNYNYLYRL
FRKSNLKPFERDISTEIYQAGSTPCNGVEGFNCYFPLQSYGFQPTNGVGYQPYRVVVLSFELLHA
PATVCGPKKSTPLVKNKCVNFNFNGLTGTGVLTESNKKFLPFQQFGRDIADTTDAVRDPQTLEIL
DITPCSFGGVSVITPGTNTSNQVAVLYQDVNCTEVPVAIHADQLTPTWRVYSTGSNVFQTRAGCL
IGAEHVNNSYECDIPIGAGICASYQTQTNSPRRARSVASQSIIAYTMSLGAENSVAYSNNSIAIP
TNFTISVTTEILPVSMTKTSVDCTMYICGDSTECSNLLLQYGSFCTQLNRALTGIAVEQDKNTQE
VFAQVKQIYKTPPIKDFGGFNFSQILPDPSKPSKRSFIEDLLFNKVTLADAGFIKQYGDCLGDIA
ARDLICAQKFNGLTVLPPLLTDEMIAQYTSALLACTITSGWTCGAGPALQIPFAMQMAYRFNGIG
VTQNVLYENQKLIANQFNSAIGKIQDSLSSTASALGKLQDVVNQNAQALNTLVKQLSSNFGAISS
VLNDILSRLDKVEAEVQIDRLITGRLQSLQTYVTQQLIRAAEIRASANLAATKMSECVLGQSKRV
DFCGKGYHLMSFPQSAPHGVVFLHVTYVPAQEKNFTTAPAICHDGKAHFPREGVFVSNGTHWFVT
QRNFYEPQIITTDNTFVSGNCDVVIGIVNNTVYDPLQPELDSFKEELDKYFKNHTSPDVDLGDIS
GINASVVNIQKEIDRLNEVAKNLNESLIDLQELGKYEQYIKWPWYIWLGFIAGLIAIVMVTIMLC
CMTSCCSCLKGCCSCGSCCKFDEDDSEPVLKGVKLHYT
SEQ ID NO 276: SEQ ID NO 1 + A892P + N532P + S884C + A893C
MFVFLVLLPLVSSQCVNLTTRTQLPPAYTNSFTRGVYYPDKVFRSSVLHSTQDLFLPFFSNVTWF
HAIHVSGTNGTKRFDNPVLPFNDGVYFASTEKSNIIRGWIFGTTLDSKTQSLLIVNNATNVVIKV
CEFQFCNDPFLGVYYHKNNKSWMESEFRVYSSANNCTFEYVSQPFLMDLEGKQGNFKNLREFVFK
NIDGYFKIYSKHTPINLVRDLPQGFSALEPLVDLPIGINITRFQTLLALHRSYLTPGDSSSGWTA
GAAAYYVGYLQPRTFLLKYNENGTITDAVDCALDPLSETKCTLKSFTVEKGIYQTSNFRVQPTES
IVRFPNITNLCPFGEVFNATRFASVYAWNRKRISNCVADYSVLYNSASFSTFKCYGVSPTKLNDL
CFTNVYADSFVIRGDEVRQIAPGQTGKIADYNYKLPDDFTGCVIAWNSNNLDSKVGGNYNYLYRL
FRKSNLKPFERDISTEIYQAGSTPCNGVEGFNCYFPLQSYGFQPTNGVGYQPYRVVVLSFELLHA
PATVCGPKKSTPLVKNKCVNFNFNGLTGTGVLTESNKKFLPFQQFGRDIADTTDAVRDPQTLEIL
DITPCSFGGVSVITPGTNTSNQVAVLYQDVNCTEVPVAIHADQLTPTWRVYSTGSNVFQTRAGCL
IGAEHVNNSYECDIPIGAGICASYQTQTNSPRRARSVASQSIIAYTMSLGAENSVAYSNNSIAIP
TNFTISVTTEILPVSMTKTSVDCTMYICGDSTECSNLLLQYGSFCTQLNRALTGIAVEQDKNTQE
VFAQVKQIYKTPPIKDFGGFNFSQILPDPSKPSKRSFIEDLLFNKVTLADAGFIKQYGDCLGDIA
ARDLICAQKFNGLTVLPPLLTDEMIAQYTSALLAGTITCGWTFGAGPCLQIPFAMQMAYRFNGIG
VTQNVLYENQKLIANQFNSAIGKIQDSLSSTASALGKLQDVVNQNAQALNTLVKQLSSNFGAISS
VLNDILSRLDKVEAEVQIDRLITGRLQSLQTYVTQQLIRAAEIRASANLAATKMSECVLGQSKRV
DFCGKGYHLMSFPQSAPHGVVFLHVTYVPAQEKNFTTAPAICHDGKAHFPREGVFVSNGTHWFVT
QRNFYEPQIITTDNTFVSGNCDVVIGIVNNTVYDPLQPELDSFKEELDKYFKNHTSPDVDLGDIS
GINASVVNIQKEIDRLNEVAKNLNESLIDLQELGKYEQYIKWPWYIWLGFIAGLIAIVMVTIMLC
CMTSCCSCLKGCCSCGSCCKFDEDDSEPVLKGVKLHYT
SEQ ID NO 277: SEQ ID NO 1 + D614N + T572I +
N532P
MFVFLVLLPLVSSQCVNLTTRTQLPPAYTNSFTRGVYYPDKVFRSSVLHSTQDLFLPFFSNVTWF
HAIHVSGTNGTKRFDNPVLPFNDGVYFASTEKSNIIRGWIFGTTLDSKTQSLLIVNNATNVVIKV
CEFQFCNDPFLGVYYHKNNKSWMESEFRVYSSANNCTFEYVSQPFLMDLEGKQGNFKNLREFVFK
NIDGYFKIYSKHTPINLVRDLPQGFSALEPLVDLPIGINITRFQTLLALHRSYLTPGDSSSGWTA
GAAAYYVGYLQPRTFLLKYNENGTITDAVDCALDPLSETKCTLKSFTVEKGIYQTSNFRVQPTES
IVRFPNITNLCPFGEVFNATRFASVYAWNRKRISNCVADYSVLYNSASFSTFKCYGVSPTKLNDL
CFTNVYADSFVIRGDEVRQIAPGQTGKIADYNYKLPDDFTGCVIAWNSNNLDSKVGGNYNYLYRL
FRKSNLKPFERDISTEIYQAGSTPCNGVEGFNCYFPLQSYGFQPTNGVGYQPYRVVVLSFELLHA
PATVCGPKKSTPLVKNKCVNFNFNGLTGTGVLTESNKKFLPFQQFGRDIADITDAVRDPQTLEIL
DITPCSFGGVSVITPGTNTSNQVAVLYQNVNCTEVPVAIHADQLTPTWRVYSTGSNVFQTRAGCL
IGAEHVNNSYECDIPIGAGICASYQTQTNSPRRARSVASQSIIAYTMSLGAENSVAYSNNSIAIP
TNFTISVTTEILPVSMTKTSVDCTMYICGDSTECSNLLLQYGSFCTQLNRALTGIAVEQDKNTQE
VFAQVKQIYKTPPIKDFGGFNFSQILPDPSKPSKRSFIEDLLFNKVTLADAGFIKQYGDCLGDIA
ARDLICAQKFNGLTVLPPLLTDEMIAQYTSALLAGTITSGWTFGAGAALQIPFAMQMAYRFNGIG
VTQNVLYENQKLIANQFNSAIGKIQDSLSSTASALGKLQDVVNQNAQALNTLVKQLSSNFGAISS
VLNDILSRLDKVEAEVQIDRLITGRLQSLQTYVTQQLIRAAEIRASANLAATKMSECVLGQSKRV
DFCGKGYHLMSFPQSAPHGVVFLHVTYVPAQEKNFTTAPAICHDGKAHFPREGVFVSNGTHWFVT
QRNFYEPQIITTDNTFVSGNCDVVIGIVNNTVYDPLQPELDSFKEELDKYFKNHTSPDVDLGDIS
GINASVVNIQKEIDRLNEVAKNLNESLIDLQELGKYEQYIKWPWYIWLGFIAGLIAIVMVTIMLC
CMTSCCSCLKGCCSCGSCCKFDEDDSEPVLKGVKLHYT
SEQ ID NO 278: SEQ ID NO 1 + D614N + T572I +
G880C + F888C
MFVFLVLLPLVSSQCVNLTTRTQLPPAYTNSFTRGVYYPDKVFRSSVLHSTQDLFLPFFSNVTWF
HAIHVSGTNGTKRFDNPVLPFNDGVYFASTEKSNIIRGWIFGTTLDSKTQSLLIVNNATNVVIKV
CEFQFCNDPFLGVYYHKNNKSWMESEFRVYSSANNCTFEYVSQPFLMDLEGKQGNFKNLREFVFK
NIDGYFKIYSKHTPINLVRDLPQGFSALEPLVDLPIGINITRFQTLLALHRSYLTPGDSSSGWTA
GAAAYYVGYLQPRTFLLKYNENGTITDAVDCALDPLSETKCTLKSFTVEKGIYQTSNFRVQPTES
IVRFPNITNLCPFGEVFNATRFASVYAWNRKRISNCVADYSVLYNSASFSTFKCYGVSPTKLNDL
CFTNVYADSFVIRGDEVRQIAPGQTGKIADYNYKLPDDFTGCVIAWNSNNLDSKVGGNYNYLYRL
FRKSNLKPFERDISTEIYQAGSTPCNGVEGFNCYFPLQSYGFQPTNGVGYQPYRVVVLSFELLHA
PATVCGPKKSTNLVKNKCVNFNFNGLTGTGVLTESNKKFLPFQQFGRDIADITDAVRDPQTLEIL
DITPCSFGGVSVITPGTNTSNQVAVLYQNVNCTEVPVAIHADQLTPTWRVYSTGSNVFQTRAGCL
IGAEHVNNSYECDIPIGAGICASYQTQTNSPRRARSVASQSIIAYTMSLGAENSVAYSNNSIAIP
TNFTISVTTEILPVSMTKTSVDCTMYICGDSTECSNLLLQYGSFCTQLNRALTGIAVEQDKNTQE
VFAQVKQIYKTPPIKDFGGFNFSQILPDPSKPSKRSFIEDLLFNKVTLADAGFIKQYGDCLGDIA
ARDLICAQKFNGLTVLPPLLTDEMIAQYTSALLACTITSGWTCGAGAALQIPFAMQMAYRFNGIG
VTQNVLYENQKLIANQFNSAIGKIQDSLSSTASALGKLQDVVNQNAQALNTLVKQLSSNFGAISS
VLNDILSRLDKVEAEVQIDRLITGRLQSLQTYVTQQLIRAAEIRASANLAATKMSECVLGQSKRV
DFCGKGYHLMSFPQSAPHGVVFLHVTYVPAQEKNFTTAPAICHDGKAHFPREGVFVSNGTHWFVT
QRNFYEPQIITTDNTFVSGNCDVVIGIVNNTVYDPLQPELDSFKEELDKYFKNHTSPDVDLGDIS
GINASVVNIQKEIDRLNEVAKNLNESLIDLQELGKYEQYIKWPWYIWLGFIAGLIAIVMVTIMLC
CMTSCCSCLKGCCSCGSCCKFDEDDSEPVLKGVKLHYT
SEQ ID NO 279: SEQ ID NO 1 + D614N + T572I +
S884C + A893C
MFVFLVLLPLVSSQCVNLTTRTQLPPAYTNSFTRGVYYPDKVFRSSVLHSTQDLFLPFFSNVTWF
HAIHVSGTNGTKRFDNPVLPFNDGVYFASTEKSNIIRGWIFGTTLDSKTQSLLIVNNATNVVIKV
CEFQFCNDPFLGVYYHKNNKSWMESEFRVYSSANNCTFEYVSQPFLMDLEGKQGNFKNLREFVFK
NIDGYFKIYSKHTPINLVRDLPQGFSALEPLVDLPIGINITRFQTLLALHRSYLTPGDSSSGWTA
GAAAYYVGYLQPRTFLLKYNENGTITDAVDCALDPLSETKCTLKSFTVEKGIYQTSNFRVQPTES
IVRFPNITNLCPFGEVFNATRFASVYAWNRKRISNCVADYSVLYNSASFSTFKCYGVSPTKLNDL
CFTNVYADSFVIRGDEVRQIAPGQTGKIADYNYKLPDDFTGCVIAWNSNNLDSKVGGNYNYLYRL
FRKSNLKPFERDISTEIYQAGSTPCNGVEGFNCYFPLQSYGFQPTNGVGYQPYRVVVLSFELLHA
PATVCGPKKSTNLVKNKCVNFNFNGLTGTGVLTESNKKFLPFQQFGRDIADITDAVRDPQTLEIL
DITPCSFGGVSVITPGTNTSNQVAVLYQNVNCTEVPVAIHADQLTPTWRVYSTGSNVFQTRAGCL
IGAEHVNNSYECDIPIGAGICASYQTQTNSPRRARSVASQSIIAYTMSLGAENSVAYSNNSIAIP
TNFTISVTTEILPVSMTKTSVDCTMYICGDSTECSNLLLQYGSFCTQLNRALTGIAVEQDKNTQE
VFAQVKQIYKTPPIKDFGGFNFSQILPDPSKPSKRSFIEDLLFNKVTLADAGFIKQYGDCLGDIA
ARDLICAQKFNGLTVLPPLLTDEMIAQYTSALLAGTITCGWTFGAGACLQIPFAMQMAYRFNGIG
VTQNVLYENQKLIANQFNSAIGKIQDSLSSTASALGKLQDVVNQNAQALNTLVKQLSSNFGAISS
VLNDILSRLDKVEAEVQIDRLITGRLQSLQTYVTQQLIRAAEIRASANLAATKMSECVLGQSKRV
DFCGKGYHLMSFPQSAPHGVVFLHVTYVPAQEKNFTTAPAICHDGKAHFPREGVFVSNGTHWFVT
QRNFYEPQIITTDNTFVSGNCDVVIGIVNNTVYDPLQPELDSFKEELDKYFKNHTSPDVDLGDIS
GINASVVNIQKEIDRLNEVAKNLNESLIDLQELGKYEQYIKWPWYIWLGFIAGLIAIVMVTIMLC
CMTSCCSCLKGCCSCGSCCKFDEDDSEPVLKGVKLHYT
SEQ ID NO 280: SEQ ID NO 1 + D614N + N532P + G880C + F888C
MFVFLVLLPLVSSQCVNLTTRTQLPPAYTNSFTRGVYYPDKVFRSSVLHSTQDLFLPFFSNVTWF
HAIHVSGTNGTKRFDNPVLPFNDGVYFASTEKSNIIRGWIFGTTLDSKTQSLLIVNNATNVVIKV
CEFQFCNDPFLGVYYHKNNKSWMESEFRVYSSANNCTFEYVSQPFLMDLEGKQGNFKNLREFVFK
NIDGYFKIYSKHTPINLVRDLPQGFSALEPLVDLPIGINITRFQTLLALHRSYLTPGDSSSGWTA
GAAAYYVGYLQPRTFLLKYNENGTITDAVDCALDPLSETKCTLKSFTVEKGIYQTSNFRVQPTES
IVRFPNITNLCPFGEVFNATRFASVYAWNRKRISNCVADYSVLYNSASFSTFKCYGVSPTKLNDL
CFTNVYADSFVIRGDEVRQIAPGQTGKIADYNYKLPDDFTGCVIAWNSNNLDSKVGGNYNYLYRL
FRKSNLKPFERDISTEIYQAGSTPCNGVEGFNCYFPLQSYGFQPTNGVGYQPYRVVVLSFELLHA
PATVCGPKKSTPLVKNKCVNFNFNGLTGTGVLTESNKKFLPFQQFGRDIADTTDAVRDPQTLEIL
DITPCSFGGVSVITPGTNTSNQVAVLYQNVNCTEVPVAIHADQLTPTWRVYSTGSNVFQTRAGCL
IGAEHVNNSYECDIPIGAGICASYQTQTNSPRRARSVASQSIIAYTMSLGAENSVAYSNNSIAIP
TNFTISVTTEILPVSMTKTSVDCTMYICGDSTECSNLLLQYGSFCTQLNRALTGIAVEQDKNTQE
VFAQVKQIYKTPPIKDFGGFNFSQILPDPSKPSKRSFIEDLLFNKVTLADAGFIKQYGDCLGDIA
ARDLICAQKFNGLTVLPPLLTDEMIAQYTSALLACTITSGWTCGAGAALQIPFAMQMAYRFNGIG
VTQNVLYENQKLIANQFNSAIGKIQDSLSSTASALGKLQDVVNQNAQALNTLVKQLSSNFGAISS
VLNDILSRLDKVEAEVQIDRLITGRLQSLQTYVTQQLIRAAEIRASANLAATKMSECVLGQSKRV
DFCGKGYHLMSFPQSAPHGVVFLHVTYVPAQEKNFTTAPAICHDGKAHFPREGVFVSNGTHWFVT
QRNFYEPQIITTDNTFVSGNCDVVIGIVNNTVYDPLQPELDSFKEELDKYFKNHTSPDVDLGDIS
GINASVVNIQKEIDRLNEVAKNLNESLIDLQELGKYEQYIKWPWYIWLGFIAGLIAIVMVTIMLC
CMTSCCSCLKGCCSCGSCCKFDEDDSEPVLKGVKLHYT
SEQ ID NO 281: SEQ ID NO 1 + D614N + N532P + S884C + A893C
MFVFLVLLPLVSSQCVNLTTRTQLPPAYTNSFTRGVYYPDKVFRSSVLHSTQDLFLPFFSNVTWF
HAIHVSGTNGTKRFDNPVLPFNDGVYFASTEKSNIIRGWIFGTTLDSKTQSLLIVNNATNVVIKV
CEFQFCNDPFLGVYYHKNNKSWMESEFRVYSSANNCTFEYVSQPFLMDLEGKQGNFKNLREFVFK
NIDGYFKIYSKHTPINLVRDLPQGFSALEPLVDLPIGINITRFQTLLALHRSYLTPGDSSSGWTA
GAAAYYVGYLQPRTFLLKYNENGTITDAVDCALDPLSETKCTLKSFTVEKGIYQTSNFRVQPTES
IVRFPNITNLCPFGEVFNATRFASVYAWNRKRISNCVADYSVLYNSASFSTFKCYGVSPTKLNDL
CFTNVYADSFVIRGDEVRQIAPGQTGKIADYNYKLPDDFTGCVIAWNSNNLDSKVGGNYNYLYRL
FRKSNLKPFERDISTEIYQAGSTPCNGVEGFNCYFPLQSYGFQPTNGVGYQPYRVVVLSFELLHA
PATVCGPKKSTPLVKNKCVNFNFNGLTGTGVLTESNKKFLPFQQFGRDIADTTDAVRDPQTLEIL
DITPCSFGGVSVITPGTNTSNQVAVLYQNVNCTEVPVAIHADQLTPTWRVYSTGSNVFQTRAGCL
IGAEHVNNSYECDIPIGAGICASYQTQTNSPRRARSVASQSIIAYTMSLGAENSVAYSNNSIAIP
TNFTISVTTEILPVSMTKTSVDCTMYICGDSTECSNLLLQYGSFCTQLNRALTGIAVEQDKNTQE
VFAQVKQIYKTPPIKDFGGFNFSQILPDPSKPSKRSFIEDLLFNKVTLADAGFIKQYGDCLGDIA
ARDLICAQKFNGLTVLPPLLTDEMIAQYTSALLAGTITCGWTFGAGACLQIPFAMQMAYRFNGIG
VTQNVLYENQKLIANQFNSAIGKIQDSLSSTASALGKLQDVVNQNAQALNTLVKQLSSNFGAISS
VLNDILSRLDKVEAEVQIDRLITGRLQSLQTYVTQQLIRAAEIRASANLAATKMSECVLGQSKRV
DFCGKGYHLMSFPQSAPHGVVFLHVTYVPAQEKNFTTAPAICHDGKAHFPREGVFVSNGTHWFVT
QRNFYEPQIITTDNTFVSGNCDVVIGIVNNTVYDPLQPELDSFKEELDKYFKNHTSPDVDLGDIS
GINASVVNIQKEIDRLNEVAKNLNESLIDLQELGKYEQYIKWPWYIWLGFIAGLIAIVMVTIMLC
CMTSCCSCLKGCCSCGSCCKFDEDDSEPVLKGVKLHYT
SEQ ID NO 282: SEQ ID NO 1 + T572I +
N532P + G880C + F888C
MFVFLVLLPLVSSQCVNLTTRTQLPPAYTNSFTRGVYYPDKVFRSSVLHSTQDLFLPFFSNVTWF
HAIHVSGTNGTKRFDNPVLPFNDGVYFASTEKSNIIRGWIFGTTLDSKTQSLLIVNNATNVVIKV
CEFQFCNDPFLGVYYHKNNKSWMESEFRVYSSANNCTFEYVSQPFLMDLEGKQGNFKNLREFVFK
NIDGYFKIYSKHTPINLVRDLPQGFSALEPLVDLPIGINITRFQTLLALHRSYLTPGDSSSGWTA
GAAAYYVGYLQPRTFLLKYNENGTITDAVDCALDPLSETKCTLKSFTVEKGIYQTSNFRVQPTES
IVRFPNITNLCPFGEVFNATRFASVYAWNRKRISNCVADYSVLYNSASFSTFKCYGVSPTKLNDL
CFTNVYADSFVIRGDEVRQIAPGQTGKIADYNYKLPDDFTGCVIAWNSNNLDSKVGGNYNYLYRL
FRKSNLKPFERDISTEIYQAGSTPCNGVEGFNCYFPLQSYGFQPTNGVGYQPYRVVVLSFELLHA
PATVCGPKKSTPLVKNKCVNFNFNGLTGTGVLTESNKKFLPFQQFGRDIADITDAVRDPQTLEIL
DITPCSFGGVSVITPGTNTSNQVAVLYQDVNCTEVPVAIHADQLTPTWRVYSTGSNVFQTRAGCL
IGAEHVNNSYECDIPIGAGICASYQTQTNSPRRARSVASQSIIAYTMSLGAENSVAYSNNSIAIP
TNFTISVTTEILPVSMTKTSVDCTMYICGDSTECSNLLLQYGSFCTQLNRALTGIAVEQDKNTQE
VFAQVKQIYKTPPIKDFGGFNFSQILPDPSKPSKRSFIEDLLFNKVTLADAGFIKQYGDCLGDIA
ARDLICAQKFNGLTVLPPLLTDEMIAQYTSALLACTITSGWTCGAGAALQIPFAMQMAYRFNGIG
VTQNVLYENQKLIANQFNSAIGKIQDSLSSTASALGKLQDVVNQNAQALNTLVKQLSSNFGAISS
VLNDILSRLDKVEAEVQIDRLITGRLQSLQTYVTQQLIRAAEIRASANLAATKMSECVLGQSKRV
DFCGKGYHLMSFPQSAPHGVVFLHVTYVPAQEKNFTTAPAICHDGKAHFPREGVFVSNGTHWFVT
QRNFYEPQIITTDNTFVSGNCDVVIGIVNNTVYDPLQPELDSFKEELDKYFKNHTSPDVDLGDIS
GINASVVNIQKEIDRLNEVAKNLNESLIDLQELGKYEQYIKWPWYIWLGFIAGLIAIVMVTIMLC
CMTSCCSCLKGCCSCGSCCKFDEDDSEPVLKGVKLHYT
SEQ ID NO 283: SEQ ID NO 1 + T572I +
N532P + S884C + A893C
MFVFLVLLPLVSSQCVNLTTRTQLPPAYTNSFTRGVYYPDKVFRSSVLHSTQDLFLPFFSNVTWF
HAIHVSGTNGTKRFDNPVLPFNDGVYFASTEKSNIIRGWIFGTTLDSKTQSLLIVNNATNVVIKV
CEFQFCNDPFLGVYYHKNNKSWMESEFRVYSSANNCTFEYVSQPFLMDLEGKQGNFKNLREFVFK
NIDGYFKIYSKHTPINLVRDLPQGFSALEPLVDLPIGINITRFQTLLALHRSYLTPGDSSSGWTA
GAAAYYVGYLQPRTFLLKYNENGTITDAVDCALDPLSETKCTLKSFTVEKGIYQTSNFRVQPTES
IVRFPNITNLCPFGEVFNATRFASVYAWNRKRISNCVADYSVLYNSASFSTFKCYGVSPTKLNDL
CFTNVYADSFVIRGDEVRQIAPGQTGKIADYNYKLPDDFTGCVIAWNSNNLDSKVGGNYNYLYRL
FRKSNLKPFERDISTEIYQAGSTPCNGVEGFNCYFPLQSYGFQPTNGVGYQPYRVVVLSFELLHA
PATVCGPKKSTPLVKNKCVNFNFNGLTGTGVLTESNKKFLPFQQFGRDIADITDAVRDPQTLEIL
DITPCSFGGVSVITPGTNTSNQVAVLYQDVNCTEVPVAIHADQLTPTWRVYSTGSNVFQTRAGCL
IGAEHVNNSYECDIPIGAGICASYQTQTNSPRRARSVASQSIIAYTMSLGAENSVAYSNNSIAIP
TNFTISVTTEILPVSMTKTSVDCTMYICGDSTECSNLLLQYGSFCTQLNRALTGIAVEQDKNTQE
VFAQVKQIYKTPPIKDFGGFNFSQILPDPSKPSKRSFIEDLLFNKVTLADAGFIKQYGDCLGDIA
ARDLICAQKFNGLTVLPPLLTDEMIAQYTSALLAGTITCGWTFGAGACLQIPFAMQMAYRFNGIG
VTQNVLYENQKLIANQFNSAIGKIQDSLSSTASALGKLQDVVNQNAQALNTLVKQLSSNFGAISS
VLNDILSRLDKVEAEVQIDRLITGRLQSLQTYVTQQLIRAAEIRASANLAATKMSECVLGQSKRV
DFCGKGYHLMSFPQSAPHGVVFLHVTYVPAQEKNFTTAPAICHDGKAHFPREGVFVSNGTHWFVT
QRNFYEPQIITTDNTFVSGNCDVVIGIVNNTVYDPLQPELDSFKEELDKYFKNHTSPDVDLGDIS
GINASVVNIQKEIDRLNEVAKNLNESLIDLQELGKYEQYIKWPWYIWLGFIAGLIAIVMVTIMLC
CMTSCCSCLKGCCSCGSCCKFDEDDSEPVLKGVKLHYT
SEQ ID NO 284: SEQ ID NO 1 + A942P + A892P + D614N + T572I
MFVFLVLLPLVSSQCVNLTTRTQLPPAYTNSFTRGVYYPDKVFRSSVLHSTQDLFLPFFSNVTWF
HAIHVSGTNGTKRFDNPVLPFNDGVYFASTEKSNIIRGWIFGTTLDSKTQSLLIVNNATNVVIKV
CEFQFCNDPFLGVYYHKNNKSWMESEFRVYSSANNCTFEYVSQPFLMDLEGKQGNFKNLREFVFK
NIDGYFKIYSKHTPINLVRDLPQGFSALEPLVDLPIGINITRFQTLLALHRSYLTPGDSSSGWTA
GAAAYYVGYLQPRTFLLKYNENGTITDAVDCALDPLSETKCTLKSFTVEKGIYQTSNFRVQPTES
IVRFPNITNLCPFGEVFNATRFASVYAWNRKRISNCVADYSVLYNSASFSTFKCYGVSPTKLNDL
CFTNVYADSFVIRGDEVRQIAPGQTGKIADYNYKLPDDFTGCVIAWNSNNLDSKVGGNYNYLYRL
FRKSNLKPFERDISTEIYQAGSTPCNGVEGFNCYFPLQSYGFQPTNGVGYQPYRVVVLSFELLHA
PATVCGPKKSTNLVKNKCVNFNFNGLTGTGVLTESNKKFLPFQQFGRDIADITDAVRDPQTLEIL
DITPCSFGGVSVITPGTNTSNQVAVLYQNVNCTEVPVAIHADQLTPTWRVYSTGSNVFQTRAGCL
IGAEHVNNSYECDIPIGAGICASYQTQTNSPRRARSVASQSIIAYTMSLGAENSVAYSNNSIAIP
TNFTISVTTEILPVSMTKTSVDCTMYICGDSTECSNLLLQYGSFCTQLNRALTGIAVEQDKNTQE
VFAQVKQIYKTPPIKDFGGFNFSQILPDPSKPSKRSFIEDLLFNKVTLADAGFIKQYGDCLGDIA
ARDLICAQKFNGLTVLPPLLTDEMIAQYTSALLAGTITSGWTFGAGPALQIPFAMQMAYRFNGIG
VTQNVLYENQKLIANQFNSAIGKIQDSLSSTPSALGKLQDVVNQNAQALNTLVKQLSSNFGAISS
VLNDILSRLDKVEAEVQIDRLITGRLQSLQTYVTQQLIRAAEIRASANLAATKMSECVLGQSKRV
DFCGKGYHLMSFPQSAPHGVVFLHVTYVPAQEKNFTTAPAICHDGKAHFPREGVFVSNGTHWFVT
QRNFYEPQIITTDNTFVSGNCDVVIGIVNNTVYDPLQPELDSFKEELDKYFKNHTSPDVDLGDIS
GINASVVNIQKEIDRLNEVAKNLNESLIDLQELGKYEQYIKWPWYIWLGFIAGLIAIVMVTIMLC
CMTSCCSCLKGCCSCGSCCKFDEDDSEPVLKGVKLHYT
SEQ ID NO 285: SEQ ID NO 1 + A942P + A892P + D614N + N532P
MFVFLVLLPLVSSQCVNLTTRTQLPPAYTNSFTRGVYYPDKVFRSSVLHSTQDLFLPFFSNVTWF
HAIHVSGTNGTKRFDNPVLPFNDGVYFASTEKSNIIRGWIFGTTLDSKTQSLLIVNNATNVVIKV
CEFQFCNDPFLGVYYHKNNKSWMESEFRVYSSANNCTFEYVSQPFLMDLEGKQGNFKNLREFVFK
NIDGYFKIYSKHTPINLVRDLPQGFSALEPLVDLPIGINITRFQTLLALHRSYLTPGDSSSGWTA
GAAAYYVGYLQPRTFLLKYNENGTITDAVDCALDPLSETKCTLKSFTVEKGIYQTSNFRVQPTES
IVRFPNITNLCPFGEVFNATRFASVYAWNRKRISNCVADYSVLYNSASFSTFKCYGVSPTKLNDL
CFTNVYADSFVIRGDEVRQIAPGQTGKIADYNYKLPDDFTGCVIAWNSNNLDSKVGGNYNYLYRL
FRKSNLKPFERDISTEIYQAGSTPCNGVEGFNCYFPLQSYGFQPTNGVGYQPYRVVVLSFELLHA
PATVCGPKKSTPLVKNKCVNFNFNGLTGTGVLTESNKKFLPFQQFGRDIADTTDAVRDPQTLEIL
DITPCSFGGVSVITPGTNTSNQVAVLYQNVNCTEVPVAIHADQLTPTWRVYSTGSNVFQTRAGCL
IGAEHVNNSYECDIPIGAGICASYQTQTNSPRRARSVASQSIIAYTMSLGAENSVAYSNNSIAIP
TNFTISVTTEILPVSMTKTSVDCTMYICGDSTECSNLLLQYGSFCTQLNRALTGIAVEQDKNTQE
VFAQVKQIYKTPPIKDFGGFNFSQILPDPSKPSKRSFIEDLLFNKVTLADAGFIKQYGDCLGDIA
ARDLICAQKFNGLTVLPPLLTDEMIAQYTSALLAGTITSGWTFGAGPALQIPFAMQMAYRFNGIG
VTQNVLYENQKLIANQFNSAIGKIQDSLSSTPSALGKLQDVVNQNAQALNTLVKQLSSNFGAISS
VLNDILSRLDKVEAEVQIDRLITGRLQSLQTYVTQQLIRAAEIRASANLAATKMSECVLGQSKRV
DFCGKGYHLMSFPQSAPHGVVFLHVTYVPAQEKNFTTAPAICHDGKAHFPREGVFVSNGTHWFVT
QRNFYEPQIITTDNTFVSGNCDVVIGIVNNTVYDPLQPELDSFKEELDKYFKNHTSPDVDLGDIS
GINASVVNIQKEIDRLNEVAKNLNESLIDLQELGKYEQYIKWPWYIWLGFIAGLIAIVMVTIMLC
CMTSCCSCLKGCCSCGSCCKFDEDDSEPVLKGVKLHYT
SEQ ID NO 286: SEQ ID NO 1 + A942P + A892P + D614N + G880C + F888C
MFVFLVLLPLVSSQCVNLTTRTQLPPAYTNSFTRGVYYPDKVFRSSVLHSTQDLFLPFFSNVTWF
HAIHVSGTNGTKRFDNPVLPFNDGVYFASTEKSNIIRGWIFGTTLDSKTQSLLIVNNATNVVIKV
CEFQFCNDPFLGVYYHKNNKSWMESEFRVYSSANNCTFEYVSQPFLMDLEGKQGNFKNLREFVFK
NIDGYFKIYSKHTPINLVRDLPQGFSALEPLVDLPIGINITRFQTLLALHRSYLTPGDSSSGWTA
GAAAYYVGYLQPRTFLLKYNENGTITDAVDCALDPLSETKCTLKSFTVEKGIYQTSNFRVQPTES
IVRFPNITNLCPFGEVFNATRFASVYAWNRKRISNCVADYSVLYNSASFSTFKCYGVSPTKLNDL
CFTNVYADSFVIRGDEVRQIAPGQTGKIADYNYKLPDDFTGCVIAWNSNNLDSKVGGNYNYLYRL
FRKSNLKPFERDISTEIYQAGSTPCNGVEGFNCYFPLQSYGFQPTNGVGYQPYRVVVLSFELLHA
PATVCGPKKSTNLVKNKCVNFNFNGLTGTGVLTESNKKFLPFQQFGRDIADTTDAVRDPQTLEIL
DITPCSFGGVSVITPGTNTSNQVAVLYQNVNCTEVPVAIHADQLTPTWRVYSTGSNVFQTRAGCL
IGAEHVNNSYECDIPIGAGICASYQTQTNSPRRARSVASQSIIAYTMSLGAENSVAYSNNSIAIP
TNFTISVTTEILPVSMTKTSVDCTMYICGDSTECSNLLLQYGSFCTQLNRALTGIAVEQDKNTQE
VFAQVKQIYKTPPIKDFGGFNFSQILPDPSKPSKRSFIEDLLFNKVTLADAGFIKQYGDCLGDIA
ARDLICAQKFNGLTVLPPLLTDEMIAQYTSALLACTITSGWTCGAGPALQIPFAMQMAYRFNGIG
VTQNVLYENQKLIANQFNSAIGKIQDSLSSTPSALGKLQDVVNQNAQALNTLVKQLSSNFGAISS
VLNDILSRLDKVEAEVQIDRLITGRLQSLQTYVTQQLIRAAEIRASANLAATKMSECVLGQSKRV
DFCGKGYHLMSFPQSAPHGVVFLHVTYVPAQEKNFTTAPAICHDGKAHFPREGVFVSNGTHWFVT
QRNFYEPQIITTDNTFVSGNCDVVIGIVNNTVYDPLQPELDSFKEELDKYFKNHTSPDVDLGDIS
GINASVVNIQKEIDRLNEVAKNLNESLIDLQELGKYEQYIKWPWYIWLGFIAGLIAIVMVTIMLC
CMTSCCSCLKGCCSCGSCCKFDEDDSEPVLKGVKLHYT
SEQ ID NO 287: SEQ ID NO 1 + A942P + A892P + D614N + S884C + A893C
MFVFLVLLPLVSSQCVNLTTRTQLPPAYTNSFTRGVYYPDKVFRSSVLHSTQDLFLPFFSNVTWF
HAIHVSGTNGTKRFDNPVLPFNDGVYFASTEKSNIIRGWIFGTTLDSKTQSLLIVNNATNVVIKV
CEFQFCNDPFLGVYYHKNNKSWMESEFRVYSSANNCTFEYVSQPFLMDLEGKQGNFKNLREFVFK
NIDGYFKIYSKHTPINLVRDLPQGFSALEPLVDLPIGINITRFQTLLALHRSYLTPGDSSSGWTA
GAAAYYVGYLQPRTFLLKYNENGTITDAVDCALDPLSETKCTLKSFTVEKGIYQTSNFRVQPTES
IVRFPNITNLCPFGEVFNATRFASVYAWNRKRISNCVADYSVLYNSASFSTFKCYGVSPTKLNDL
CFTNVYADSFVIRGDEVRQIAPGQTGKIADYNYKLPDDFTGCVIAWNSNNLDSKVGGNYNYLYRL
FRKSNLKPFERDISTEIYQAGSTPCNGVEGFNCYFPLQSYGFQPTNGVGYQPYRVVVLSFELLHA
PATVCGPKKSTNLVKNKCVNFNFNGLTGTGVLTESNKKFLPFQQFGRDIADTTDAVRDPQTLEIL
DITPCSFGGVSVITPGTNTSNQVAVLYQNVNCTEVPVAIHADQLTPTWRVYSTGSNVFQTRAGCL
IGAEHVNNSYECDIPIGAGICASYQTQTNSPRRARSVASQSIIAYTMSLGAENSVAYSNNSIAIP
TNFTISVTTEILPVSMTKTSVDCTMYICGDSTECSNLLLQYGSFCTQLNRALTGIAVEQDKNTQE
VFAQVKQIYKTPPIKDFGGFNFSQILPDPSKPSKRSFIEDLLFNKVTLADAGFIKQYGDCLGDIA
ARDLICAQKFNGLTVLPPLLTDEMIAQYTSALLAGTITCGWTFGAGPCLQIPFAMQMAYRFNGIG
VTQNVLYENQKLIANQFNSAIGKIQDSLSSTPSALGKLQDVVNQNAQALNTLVKQLSSNFGAISS
VLNDILSRLDKVEAEVQIDRLITGRLQSLQTYVTQQLIRAAEIRASANLAATKMSECVLGQSKRV
DFCGKGYHLMSFPQSAPHGVVFLHVTYVPAQEKNFTTAPAICHDGKAHFPREGVFVSNGTHWFVT
QRNFYEPQIITTDNTFVSGNCDVVIGIVNNTVYDPLQPELDSFKEELDKYFKNHTSPDVDLGDIS
GINASVVNIQKEIDRLNEVAKNLNESLIDLQELGKYEQYIKWPWYIWLGFIAGLIAIVMVTIMLC
CMTSCCSCLKGCCSCGSCCKFDEDDSEPVLKGVKLHYT
SEQ ID NO 288: SEQ ID NO 1 + A942P + A892P + T572I +
N532P
MFVFLVLLPLVSSQCVNLTTRTQLPPAYTNSFTRGVYYPDKVFRSSVLHSTQDLFLPFFSNVTWF
HAIHVSGTNGTKRFDNPVLPFNDGVYFASTEKSNIIRGWIFGTTLDSKTQSLLIVNNATNVVIKV
CEFQFCNDPFLGVYYHKNNKSWMESEFRVYSSANNCTFEYVSQPFLMDLEGKQGNFKNLREFVFK
NIDGYFKIYSKHTPINLVRDLPQGFSALEPLVDLPIGINITRFQTLLALHRSYLTPGDSSSGWTA
GAAAYYVGYLQPRTFLLKYNENGTITDAVDCALDPLSETKCTLKSFTVEKGIYQTSNFRVQPTES
IVRFPNITNLCPFGEVFNATRFASVYAWNRKRISNCVADYSVLYNSASFSTFKCYGVSPTKLNDL
CFTNVYADSFVIRGDEVRQIAPGQTGKIADYNYKLPDDFTGCVIAWNSNNLDSKVGGNYNYLYRL
FRKSNLKPFERDISTEIYQAGSTPCNGVEGFNCYFPLQSYGFQPTNGVGYQPYRVVVLSFELLHA
PATVCGPKKSTPLVKNKCVNFNFNGLTGTGVLTESNKKFLPFQQFGRDIADITDAVRDPQTLEIL
DITPCSFGGVSVITPGTNTSNQVAVLYQDVNCTEVPVAIHADQLTPTWRVYSTGSNVFQTRAGCL
IGAEHVNNSYECDIPIGAGICASYQTQTNSPRRARSVASQSIIAYTMSLGAENSVAYSNNSIAIP
TNFTISVTTEILPVSMTKTSVDCTMYICGDSTECSNLLLQYGSFCTQLNRALTGIAVEQDKNTQE
VFAQVKQIYKTPPIKDFGGFNFSQILPDPSKPSKRSFIEDLLFNKVTLADAGFIKQYGDCLGDIA
ARDLICAQKFNGLTVLPPLLTDEMIAQYTSALLAGTITSGWTFGAGPALQIPFAMQMAYRFNGIG
VTQNVLYENQKLIANQFNSAIGKIQDSLSSTPSALGKLQDVVNQNAQALNTLVKQLSSNFGAISS
VLNDILSRLDKVEAEVQIDRLITGRLQSLQTYVTQQLIRAAEIRASANLAATKMSECVLGQSKRV
DFCGKGYHLMSFPQSAPHGVVFLHVTYVPAQEKNFTTAPAICHDGKAHFPREGVFVSNGTHWFVT
QRNFYEPQIITTDNTFVSGNCDVVIGIVNNTVYDPLQPELDSFKEELDKYFKNHTSPDVDLGDIS
GINASVVNIQKEIDRLNEVAKNLNESLIDLQELGKYEQYIKWPWYIWLGFIAGLIAIVMVTIMLC
CMTSCCSCLKGCCSCGSCCKFDEDDSEPVLKGVKLHYT
SEQ ID NO 289: SEQ ID NO 1 + A942P + A892P + T572I +
G880C + F888C
MFVFLVLLPLVSSQCVNLTTRTQLPPAYTNSFTRGVYYPDKVFRSSVLHSTQDLFLPFFSNVTWF
HAIHVSGTNGTKRFDNPVLPFNDGVYFASTEKSNIIRGWIFGTTLDSKTQSLLIVNNATNVVIKV
CEFQFCNDPFLGVYYHKNNKSWMESEFRVYSSANNCTFEYVSQPFLMDLEGKQGNFKNLREFVFK
NIDGYFKIYSKHTPINLVRDLPQGFSALEPLVDLPIGINITRFQTLLALHRSYLTPGDSSSGWTA
GAAAYYVGYLQPRTFLLKYNENGTITDAVDCALDPLSETKCTLKSFTVEKGIYQTSNFRVQPTES
IVRFPNITNLCPFGEVFNATRFASVYAWNRKRISNCVADYSVLYNSASFSTFKCYGVSPTKLNDL
CFTNVYADSFVIRGDEVRQIAPGQTGKIADYNYKLPDDFTGCVIAWNSNNLDSKVGGNYNYLYRL
FRKSNLKPFERDISTEIYQAGSTPCNGVEGFNCYFPLQSYGFQPTNGVGYQPYRVVVLSFELLHA
PATVCGPKKSTNLVKNKCVNFNFNGLTGTGVLTESNKKFLPFQQFGRDIADITDAVRDPQTLEIL
DITPCSFGGVSVITPGTNTSNQVAVLYQDVNCTEVPVAIHADQLTPTWRVYSTGSNVFQTRAGCL
IGAEHVNNSYECDIPIGAGICASYQTQTNSPRRARSVASQSIIAYTMSLGAENSVAYSNNSIAIP
TNFTISVTTEILPVSMTKTSVDCTMYICGDSTECSNLLLQYGSFCTQLNRALTGIAVEQDKNTQE
VFAQVKQIYKTPPIKDFGGFNFSQILPDPSKPSKRSFIEDLLFNKVTLADAGFIKQYGDCLGDIA
ARDLICAQKFNGLTVLPPLLTDEMIAQYTSALLACTITSGWTCGAGPALQIPFAMQMAYRFNGIG
VTQNVLYENQKLIANQFNSAIGKIQDSLSSTPSALGKLQDVVNQNAQALNTLVKQLSSNFGAISS
VLNDILSRLDKVEAEVQIDRLITGRLQSLQTYVTQQLIRAAEIRASANLAATKMSECVLGQSKRV
DFCGKGYHLMSFPQSAPHGVVFLHVTYVPAQEKNFTTAPAICHDGKAHFPREGVFVSNGTHWFVT
QRNFYEPQIITTDNTFVSGNCDVVIGIVNNTVYDPLQPELDSFKEELDKYFKNHTSPDVDLGDIS
GINASVVNIQKEIDRLNEVAKNLNESLIDLQELGKYEQYIKWPWYIWLGFIAGLIAIVMVTIMLC
CMTSCCSCLKGCCSCGSCCKFDEDDSEPVLKGVKLHYT
SEQ ID NO 290: SEQ ID NO 1 + A942P + A892P + T572I +
S884C + A893C
MFVFLVLLPLVSSQCVNLTTRTQLPPAYTNSFTRGVYYPDKVFRSSVLHSTQDLFLPFFSNVTWF
HAIHVSGTNGTKRFDNPVLPFNDGVYFASTEKSNIIRGWIFGTTLDSKTQSLLIVNNATNVVIKV
CEFQFCNDPFLGVYYHKNNKSWMESEFRVYSSANNCTFEYVSQPFLMDLEGKQGNFKNLREFVFK
NIDGYFKIYSKHTPINLVRDLPQGFSALEPLVDLPIGINITRFQTLLALHRSYLTPGDSSSGWTA
GAAAYYVGYLQPRTFLLKYNENGTITDAVDCALDPLSETKCTLKSFTVEKGIYQTSNFRVQPTES
IVRFPNITNLCPFGEVFNATRFASVYAWNRKRISNCVADYSVLYNSASFSTFKCYGVSPTKLNDL
CFTNVYADSFVIRGDEVRQIAPGQTGKIADYNYKLPDDFTGCVIAWNSNNLDSKVGGNYNYLYRL
FRKSNLKPFERDISTEIYQAGSTPCNGVEGFNCYFPLQSYGFQPTNGVGYQPYRVVVLSFELLHA
PATVCGPKKSTNLVKNKCVNFNFNGLTGTGVLTESNKKFLPFQQFGRDIADITDAVRDPQTLEIL
DITPCSFGGVSVITPGTNTSNQVAVLYQDVNCTEVPVAIHADQLTPTWRVYSTGSNVFQTRAGCL
IGAEHVNNSYECDIPIGAGICASYQTQTNSPRRARSVASQSIIAYTMSLGAENSVAYSNNSIAIP
TNFTISVTTEILPVSMTKTSVDCTMYICGDSTECSNLLLQYGSFCTQLNRALTGIAVEQDKNTQE
VFAQVKQIYKTPPIKDFGGFNFSQILPDPSKPSKRSFIEDLLFNKVTLADAGFIKQYGDCLGDIA
ARDLICAQKFNGLTVLPPLLTDEMIAQYTSALLAGTITCGWTFGAGPCLQIPFAMQMAYRFNGIG
VTQNVLYENQKLIANQFNSAIGKIQDSLSSTPSALGKLQDVVNQNAQALNTLVKQLSSNFGAISS
VLNDILSRLDKVEAEVQIDRLITGRLQSLQTYVTQQLIRAAEIRASANLAATKMSECVLGQSKRV
DFCGKGYHLMSFPQSAPHGVVFLHVTYVPAQEKNFTTAPAICHDGKAHFPREGVFVSNGTHWFVT
QRNFYEPQIITTDNTFVSGNCDVVIGIVNNTVYDPLQPELDSFKEELDKYFKNHTSPDVDLGDIS
GINASVVNIQKEIDRLNEVAKNLNESLIDLQELGKYEQYIKWPWYIWLGFIAGLIAIVMVTIMLC
CMTSCCSCLKGCCSCGSCCKFDEDDSEPVLKGVKLHYT
SEQ ID NO 291: SEQ ID NO 1 + A942P + A892P + N532P + G880C + F888C
MFVFLVLLPLVSSQCVNLTTRTQLPPAYTNSFTRGVYYPDKVFRSSVLHSTQDLFLPFFSNVTWF
HAIHVSGTNGTKRFDNPVLPFNDGVYFASTEKSNIIRGWIFGTTLDSKTQSLLIVNNATNVVIKV
CEFQFCNDPFLGVYYHKNNKSWMESEFRVYSSANNCTFEYVSQPFLMDLEGKQGNFKNLREFVFK
NIDGYFKIYSKHTPINLVRDLPQGFSALEPLVDLPIGINITRFQTLLALHRSYLTPGDSSSGWTA
GAAAYYVGYLQPRTFLLKYNENGTITDAVDCALDPLSETKCTLKSFTVEKGIYQTSNFRVQPTES
IVRFPNITNLCPFGEVFNATRFASVYAWNRKRISNCVADYSVLYNSASFSTFKCYGVSPTKLNDL
CFTNVYADSFVIRGDEVRQIAPGQTGKIADYNYKLPDDFTGCVIAWNSNNLDSKVGGNYNYLYRL
FRKSNLKPFERDISTEIYQAGSTPCNGVEGFNCYFPLQSYGFQPTNGVGYQPYRVVVLSFELLHA
PATVCGPKKSTPLVKNKCVNFNFNGLTGTGVLTESNKKFLPFQQFGRDIADTTDAVRDPQTLEIL
DITPCSFGGVSVITPGTNTSNQVAVLYQDVNCTEVPVAIHADQLTPTWRVYSTGSNVFQTRAGCL
IGAEHVNNSYECDIPIGAGICASYQTQTNSPRRARSVASQSIIAYTMSLGAENSVAYSNNSIAIP
TNFTISVTTEILPVSMTKTSVDCTMYICGDSTECSNLLLQYGSFCTQLNRALTGIAVEQDKNTQE
VFAQVKQIYKTPPIKDFGGFNFSQILPDPSKPSKRSFIEDLLFNKVTLADAGFIKQYGDCLGDIA
ARDLICAQKFNGLTVLPPLLTDEMIAQYTSALLACTITSGWTCGAGPALQIPFAMQMAYRFNGIG
VTQNVLYENQKLIANQFNSAIGKIQDSLSSTPSALGKLQDVVNQNAQALNTLVKQLSSNFGAISS
VLNDILSRLDKVEAEVQIDRLITGRLQSLQTYVTQQLIRAAEIRASANLAATKMSECVLGQSKRV
DFCGKGYHLMSFPQSAPHGVVFLHVTYVPAQEKNFTTAPAICHDGKAHFPREGVFVSNGTHWFVT
QRNFYEPQIITTDNTFVSGNCDVVIGIVNNTVYDPLQPELDSFKEELDKYFKNHTSPDVDLGDIS
GINASVVNIQKEIDRLNEVAKNLNESLIDLQELGKYEQYIKWPWYIWLGFIAGLIAIVMVTIMLC
CMTSCCSCLKGCCSCGSCCKFDEDDSEPVLKGVKLHYT
SEQ ID NO 292: SEQ ID NO 1 + A942P + A892P + N532P + S884C + A893C
MFVFLVLLPLVSSQCVNLTTRTQLPPAYTNSFTRGVYYPDKVFRSSVLHSTQDLFLPFFSNVTWF
HAIHVSGTNGTKRFDNPVLPFNDGVYFASTEKSNIIRGWIFGTTLDSKTQSLLIVNNATNVVIKV
CEFQFCNDPFLGVYYHKNNKSWMESEFRVYSSANNCTFEYVSQPFLMDLEGKQGNFKNLREFVFK
NIDGYFKIYSKHTPINLVRDLPQGFSALEPLVDLPIGINITRFQTLLALHRSYLTPGDSSSGWTA
GAAAYYVGYLQPRTFLLKYNENGTITDAVDCALDPLSETKCTLKSFTVEKGIYQTSNFRVQPTES
IVRFPNITNLCPFGEVFNATRFASVYAWNRKRISNCVADYSVLYNSASFSTFKCYGVSPTKLNDL
CFTNVYADSFVIRGDEVRQIAPGQTGKIADYNYKLPDDFTGCVIAWNSNNLDSKVGGNYNYLYRL
FRKSNLKPFERDISTEIYQAGSTPCNGVEGFNCYFPLQSYGFQPTNGVGYQPYRVVVLSFELLHA
PATVCGPKKSTPLVKNKCVNFNFNGLTGTGVLTESNKKFLPFQQFGRDIADTTDAVRDPQTLEIL
DITPCSFGGVSVITPGTNTSNQVAVLYQDVNCTEVPVAIHADQLTPTWRVYSTGSNVFQTRAGCL
IGAEHVNNSYECDIPIGAGICASYQTQTNSPRRARSVASQSIIAYTMSLGAENSVAYSNNSIAIP
TNFTISVTTEILPVSMTKTSVDCTMYICGDSTECSNLLLQYGSFCTQLNRALTGIAVEQDKNTQE
VFAQVKQIYKTPPIKDFGGFNFSQILPDPSKPSKRSFIEDLLFNKVTLADAGFIKQYGDCLGDIA
ARDLICAQKFNGLTVLPPLLTDEMIAQYTSALLAGTITCGWTFGAGPCLQIPFAMQMAYRFNGIG
VTQNVLYENQKLIANQFNSAIGKIQDSLSSTPSALGKLQDVVNQNAQALNTLVKQLSSNFGAISS
VLNDILSRLDKVEAEVQIDRLITGRLQSLQTYVTQQLIRAAEIRASANLAATKMSECVLGQSKRV
DFCGKGYHLMSFPQSAPHGVVFLHVTYVPAQEKNFTTAPAICHDGKAHFPREGVFVSNGTHWFVT
QRNFYEPQIITTDNTFVSGNCDVVIGIVNNTVYDPLQPELDSFKEELDKYFKNHTSPDVDLGDIS
GINASVVNIQKEIDRLNEVAKNLNESLIDLQELGKYEQYIKWPWYIWLGFIAGLIAIVMVTIMLC
CMTSCCSCLKGCCSCGSCCKFDEDDSEPVLKGVKLHYT
SEQ ID NO 293: SEQ ID NO 1 + A942P + D614N + T572I +
N532P
MFVFLVLLPLVSSQCVNLTTRTQLPPAYTNSFTRGVYYPDKVFRSSVLHSTQDLFLPFFSNVTWF
HAIHVSGTNGTKRFDNPVLPFNDGVYFASTEKSNIIRGWIFGTTLDSKTQSLLIVNNATNVVIKV
CEFQFCNDPFLGVYYHKNNKSWMESEFRVYSSANNCTFEYVSQPFLMDLEGKQGNFKNLREFVFK
NIDGYFKIYSKHTPINLVRDLPQGFSALEPLVDLPIGINITRFQTLLALHRSYLTPGDSSSGWTA
GAAAYYVGYLQPRTFLLKYNENGTITDAVDCALDPLSETKCTLKSFTVEKGIYQTSNFRVQPTES
IVRFPNITNLCPFGEVFNATRFASVYAWNRKRISNCVADYSVLYNSASFSTFKCYGVSPTKLNDL
CFTNVYADSFVIRGDEVRQIAPGQTGKIADYNYKLPDDFTGCVIAWNSNNLDSKVGGNYNYLYRL
FRKSNLKPFERDISTEIYQAGSTPCNGVEGFNCYFPLQSYGFQPTNGVGYQPYRVVVLSFELLHA
PATVCGPKKSTPLVKNKCVNFNFNGLTGTGVLTESNKKFLPFQQFGRDIADITDAVRDPQTLEIL
DITPCSFGGVSVITPGTNTSNQVAVLYQNVNCTEVPVAIHADQLTPTWRVYSTGSNVFQTRAGCL
IGAEHVNNSYECDIPIGAGICASYQTQTNSPRRARSVASQSIIAYTMSLGAENSVAYSNNSIAIP
TNFTISVTTEILPVSMTKTSVDCTMYICGDSTECSNLLLQYGSFCTQLNRALTGIAVEQDKNTQE
VFAQVKQIYKTPPIKDFGGFNFSQILPDPSKPSKRSFIEDLLFNKVTLADAGFIKQYGDCLGDIA
ARDLICAQKFNGLTVLPPLLTDEMIAQYTSALLAGTITSGWTFGAGAALQIPFAMQMAYRFNGIG
VTQNVLYENQKLIANQFNSAIGKIQDSLSSTPSALGKLQDVVNQNAQALNTLVKQLSSNFGAISS
VLNDILSRLDKVEAEVQIDRLITGRLQSLQTYVTQQLIRAAEIRASANLAATKMSECVLGQSKRV
DFCGKGYHLMSFPQSAPHGVVFLHVTYVPAQEKNFTTAPAICHDGKAHFPREGVFVSNGTHWFVT
QRNFYEPQIITTDNTFVSGNCDVVIGIVNNTVYDPLQPELDSFKEELDKYFKNHTSPDVDLGDIS
GINASVVNIQKEIDRLNEVAKNLNESLIDLQELGKYEQYIKWPWYIWLGFIAGLIAIVMVTIMLC
CMTSCCSCLKGCCSCGSCCKFDEDDSEPVLKGVKLHYT
SEQ ID NO 294: SEQ ID NO 1 + A942P + D614N + T572I +
G880C + F888C
MFVFLVLLPLVSSQCVNLTTRTQLPPAYTNSFTRGVYYPDKVFRSSVLHSTQDLFLPFFSNVTWF
HAIHVSGTNGTKRFDNPVLPFNDGVYFASTEKSNIIRGWIFGTTLDSKTQSLLIVNNATNVVIKV
CEFQFCNDPFLGVYYHKNNKSWMESEFRVYSSANNCTFEYVSQPFLMDLEGKQGNFKNLREFVFK
NIDGYFKIYSKHTPINLVRDLPQGFSALEPLVDLPIGINITRFQTLLALHRSYLTPGDSSSGWTA
GAAAYYVGYLQPRTFLLKYNENGTITDAVDCALDPLSETKCTLKSFTVEKGIYQTSNFRVQPTES
IVRFPNITNLCPFGEVFNATRFASVYAWNRKRISNCVADYSVLYNSASFSTFKCYGVSPTKLNDL
CFTNVYADSFVIRGDEVRQIAPGQTGKIADYNYKLPDDFTGCVIAWNSNNLDSKVGGNYNYLYRL
FRKSNLKPFERDISTEIYQAGSTPCNGVEGFNCYFPLQSYGFQPTNGVGYQPYRVVVLSFELLHA
PATVCGPKKSTNLVKNKCVNFNFNGLTGTGVLTESNKKFLPFQQFGRDIADITDAVRDPQTLEIL
DITPCSFGGVSVITPGTNTSNQVAVLYQNVNCTEVPVAIHADQLTPTWRVYSTGSNVFQTRAGCL
IGAEHVNNSYECDIPIGAGICASYQTQTNSPRRARSVASQSIIAYTMSLGAENSVAYSNNSIAIP
TNFTISVTTEILPVSMTKTSVDCTMYICGDSTECSNLLLQYGSFCTQLNRALTGIAVEQDKNTQE
VFAQVKQIYKTPPIKDFGGFNFSQILPDPSKPSKRSFIEDLLFNKVTLADAGFIKQYGDCLGDIA
ARDLICAQKFNGLTVLPPLLTDEMIAQYTSALLACTITSGWTCGAGAALQIPFAMQMAYRFNGIG
VTQNVLYENQKLIANQFNSAIGKIQDSLSSTPSALGKLQDVVNQNAQALNTLVKQLSSNFGAISS
VLNDILSRLDKVEAEVQIDRLITGRLQSLQTYVTQQLIRAAEIRASANLAATKMSECVLGQSKRV
DFCGKGYHLMSFPQSAPHGVVFLHVTYVPAQEKNFTTAPAICHDGKAHFPREGVFVSNGTHWFVT
QRNFYEPQIITTDNTFVSGNCDVVIGIVNNTVYDPLQPELDSFKEELDKYFKNHTSPDVDLGDIS
GINASVVNIQKEIDRLNEVAKNLNESLIDLQELGKYEQYIKWPWYIWLGFIAGLIAIVMVTIMLC
CMTSCCSCLKGCCSCGSCCKFDEDDSEPVLKGVKLHYT
SEQ ID NO 295: SEQ ID NO 1 + A942P + D614N + T572I +
S884C + A893C
MFVFLVLLPLVSSQCVNLTTRTQLPPAYTNSFTRGVYYPDKVFRSSVLHSTQDLFLPFFSNVTWF
HAIHVSGTNGTKRFDNPVLPFNDGVYFASTEKSNIIRGWIFGTTLDSKTQSLLIVNNATNVVIKV
CEFQFCNDPFLGVYYHKNNKSWMESEFRVYSSANNCTFEYVSQPFLMDLEGKQGNFKNLREFVFK
NIDGYFKIYSKHTPINLVRDLPQGFSALEPLVDLPIGINITRFQTLLALHRSYLTPGDSSSGWTA
GAAAYYVGYLQPRTFLLKYNENGTITDAVDCALDPLSETKCTLKSFTVEKGIYQTSNFRVQPTES
IVRFPNITNLCPFGEVFNATRFASVYAWNRKRISNCVADYSVLYNSASFSTFKCYGVSPTKLNDL
CFTNVYADSFVIRGDEVRQIAPGQTGKIADYNYKLPDDFTGCVIAWNSNNLDSKVGGNYNYLYRL
FRKSNLKPFERDISTEIYQAGSTPCNGVEGFNCYFPLQSYGFQPTNGVGYQPYRVVVLSFELLHA
PATVCGPKKSTNLVKNKCVNFNFNGLTGTGVLTESNKKFLPFQQFGRDIADITDAVRDPQTLEIL
DITPCSFGGVSVITPGTNTSNQVAVLYQNVNCTEVPVAIHADQLTPTWRVYSTGSNVFQTRAGCL
IGAEHVNNSYECDIPIGAGICASYQTQTNSPRRARSVASQSIIAYTMSLGAENSVAYSNNSIAIP
TNFTISVTTEILPVSMTKTSVDCTMYICGDSTECSNLLLQYGSFCTQLNRALTGIAVEQDKNTQE
VFAQVKQIYKTPPIKDFGGFNFSQILPDPSKPSKRSFIEDLLFNKVTLADAGFIKQYGDCLGDIA
ARDLICAQKFNGLTVLPPLLTDEMIAQYTSALLAGTITCGWTFGAGACLQIPFAMQMAYRENGIG
VTQNVLYENQKLIANQFNSAIGKIQDSLSSTPSALGKLQDVVNQNAQALNTLVKQLSSNFGAISS
VLNDILSRLDKVEAEVQIDRLITGRLQSLQTYVTQQLIRAAEIRASANLAATKMSECVLGQSKRV
DFCGKGYHLMSFPQSAPHGVVFLHVTYVPAQEKNFTTAPAICHDGKAHFPREGVFVSNGTHWFVT
QRNFYEPQIITTDNTFVSGNCDVVIGIVNNTVYDPLQPELDSFKEELDKYFKNHTSPDVDLGDIS
GINASVVNIQKEIDRLNEVAKNLNESLIDLQELGKYEQYIKWPWYIWLGFIAGLIAIVMVTIMLC
CMTSCCSCLKGCCSCGSCCKFDEDDSEPVLKGVKLHYT
SEQ ID NO 296: SEQ ID NO 1 + A942P + D614N + N532P + G880C + F888C
MFVFLVLLPLVSSQCVNLTTRTQLPPAYTNSFTRGVYYPDKVFRSSVLHSTQDLFLPFFSNVTWF
HAIHVSGTNGTKRFDNPVLPFNDGVYFASTEKSNIIRGWIFGTTLDSKTQSLLIVNNATNVVIKV
CEFQFCNDPFLGVYYHKNNKSWMESEFRVYSSANNCTFEYVSQPFLMDLEGKQGNFKNLREFVFK
NIDGYFKIYSKHTPINLVRDLPQGFSALEPLVDLPIGINITRFQTLLALHRSYLTPGDSSSGWTA
GAAAYYVGYLQPRTFLLKYNENGTITDAVDCALDPLSETKCTLKSFTVEKGIYQTSNFRVQPTES
IVRFPNITNLCPFGEVFNATRFASVYAWNRKRISNCVADYSVLYNSASFSTFKCYGVSPTKLNDL
CFTNVYADSFVIRGDEVRQIAPGQTGKIADYNYKLPDDFTGCVIAWNSNNLDSKVGGNYNYLYRL
FRKSNLKPFERDISTEIYQAGSTPCNGVEGFNCYFPLQSYGFQPTNGVGYQPYRVVVLSFELLHA
PATVCGPKKSTPLVKNKCVNFNFNGLTGTGVLTESNKKFLPFQQFGRDIADTTDAVRDPQTLEIL
DITPCSFGGVSVITPGTNTSNQVAVLYQNVNCTEVPVAIHADQLTPTWRVYSTGSNVFQTRAGCL
IGAEHVNNSYECDIPIGAGICASYQTQTNSPRRARSVASQSIIAYTMSLGAENSVAYSNNSIAIP
TNFTISVTTEILPVSMTKTSVDCTMYICGDSTECSNLLLQYGSFCTQLNRALTGIAVEQDKNTQE
VFAQVKQIYKTPPIKDFGGFNFSQILPDPSKPSKRSFIEDLLFNKVTLADAGFIKQYGDCLGDIA
ARDLICAQKFNGLTVLPPLLTDEMIAQYTSALLACTITSGWTCGAGAALQIPFAMQMAYRFNGIG
VTQNVLYENQKLIANQFNSAIGKIQDSLSSTPSALGKLQDVVNQNAQALNTLVKQLSSNFGAISS
VLNDILSRLDKVEAEVQIDRLITGRLQSLQTYVTQQLIRAAEIRASANLAATKMSECVLGQSKRV
DFCGKGYHLMSFPQSAPHGVVFLHVTYVPAQEKNFTTAPAICHDGKAHFPREGVFVSNGTHWFVT
QRNFYEPQIITTDNTFVSGNCDVVIGIVNNTVYDPLQPELDSFKEELDKYFKNHTSPDVDLGDIS
GINASVVNIQKEIDRLNEVAKNLNESLIDLQELGKYEQYIKWPWYIWLGFIAGLIAIVMVTIMLC
CMTSCCSCLKGCCSCGSCCKFDEDDSEPVLKGVKLHYT
SEQ ID NO 297: SEQ ID NO 1 + A942P + D614N + N532P + S884C + A893C
MFVFLVLLPLVSSQCVNLTTRTQLPPAYTNSFTRGVYYPDKVFRSSVLHSTQDLFLPFFSNVTWF
HAIHVSGTNGTKRFDNPVLPFNDGVYFASTEKSNIIRGWIFGTTLDSKTQSLLIVNNATNVVIKV
CEFQFCNDPFLGVYYHKNNKSWMESEFRVYSSANNCTFEYVSQPFLMDLEGKQGNFKNLREFVFK
NIDGYFKIYSKHTPINLVRDLPQGFSALEPLVDLPIGINITRFQTLLALHRSYLTPGDSSSGWTA
GAAAYYVGYLQPRTFLLKYNENGTITDAVDCALDPLSETKCTLKSFTVEKGIYQTSNFRVQPTES
IVRFPNITNLCPFGEVFNATRFASVYAWNRKRISNCVADYSVLYNSASFSTFKCYGVSPTKLNDL
CFTNVYADSFVIRGDEVRQIAPGQTGKIADYNYKLPDDFTGCVIAWNSNNLDSKVGGNYNYLYRL
FRKSNLKPFERDISTEIYQAGSTPCNGVEGFNCYFPLQSYGFQPTNGVGYQPYRVVVLSFELLHA
PATVCGPKKSTPLVKNKCVNFNFNGLTGTGVLTESNKKFLPFQQFGRDIADTTDAVRDPQTLEIL
DITPCSFGGVSVITPGTNTSNQVAVLYQNVNCTEVPVAIHADQLTPTWRVYSTGSNVFQTRAGCL
IGAEHVNNSYECDIPIGAGICASYQTQTNSPRRARSVASQSIIAYTMSLGAENSVAYSNNSIAIP
TNFTISVTTEILPVSMTKTSVDCTMYICGDSTECSNLLLQYGSFCTQLNRALTGIAVEQDKNTQE
VFAQVKQIYKTPPIKDFGGFNFSQILPDPSKPSKRSFIEDLLFNKVTLADAGFIKQYGDCLGDIA
ARDLICAQKFNGLTVLPPLLTDEMIAQYTSALLAGTITCGWTFGAGACLQIPFAMQMAYRFNGIG
VTQNVLYENQKLIANQFNSAIGKIQDSLSSTPSALGKLQDVVNQNAQALNTLVKQLSSNFGAISS
VLNDILSRLDKVEAEVQIDRLITGRLQSLQTYVTQQLIRAAEIRASANLAATKMSECVLGQSKRV
DFCGKGYHLMSFPQSAPHGVVFLHVTYVPAQEKNFTTAPAICHDGKAHFPREGVFVSNGTHWFVT
QRNFYEPQIITTDNTFVSGNCDVVIGIVNNTVYDPLQPELDSFKEELDKYFKNHTSPDVDLGDIS
GINASVVNIQKEIDRLNEVAKNLNESLIDLQELGKYEQYIKWPWYIWLGFIAGLIAIVMVTIMLC
CMTSCCSCLKGCCSCGSCCKFDEDDSEPVLKGVKLHYT
SEQ ID NO 298: SEQ ID NO 1 + A942P + T572I +
N532P + G880C + F888C
MFVFLVLLPLVSSQCVNLTTRTQLPPAYTNSFTRGVYYPDKVFRSSVLHSTQDLFLPFFSNVTWF
HAIHVSGTNGTKRFDNPVLPFNDGVYFASTEKSNIIRGWIFGTTLDSKTQSLLIVNNATNVVIKV
CEFQFCNDPFLGVYYHKNNKSWMESEFRVYSSANNCTFEYVSQPFLMDLEGKQGNFKNLREFVFK
NIDGYFKIYSKHTPINLVRDLPQGFSALEPLVDLPIGINITRFQTLLALHRSYLTPGDSSSGWTA
GAAAYYVGYLQPRTFLLKYNENGTITDAVDCALDPLSETKCTLKSFTVEKGIYQTSNFRVQPTES
IVRFPNITNLCPFGEVFNATRFASVYAWNRKRISNCVADYSVLYNSASFSTFKCYGVSPTKLNDL
CFTNVYADSFVIRGDEVRQIAPGQTGKIADYNYKLPDDFTGCVIAWNSNNLDSKVGGNYNYLYRL
FRKSNLKPFERDISTEIYQAGSTPCNGVEGFNCYFPLQSYGFQPTNGVGYQPYRVVVLSFELLHA
PATVCGPKKSTPLVKNKCVNFNFNGLTGTGVLTESNKKFLPFQQFGRDIADITDAVRDPQTLEIL
DITPCSFGGVSVITPGTNTSNQVAVLYQDVNCTEVPVAIHADQLTPTWRVYSTGSNVFQTRAGCL
IGAEHVNNSYECDIPIGAGICASYQTQTNSPRRARSVASQSIIAYTMSLGAENSVAYSNNSIAIP
TNFTISVTTEILPVSMTKTSVDCTMYICGDSTECSNLLLQYGSFCTQLNRALTGIAVEQDKNTQE
VFAQVKQIYKTPPIKDFGGFNFSQILPDPSKPSKRSFIEDLLFNKVTLADAGFIKQYGDCLGDIA
ARDLICAQKFNGLTVLPPLLTDEMIAQYTSALLACTITSGWTCGAGAALQIPFAMQMAYRFNGIG
VTQNVLYENQKLIANQFNSAIGKIQDSLSSTPSALGKLQDVVNQNAQALNTLVKQLSSNFGAISS
VLNDILSRLDKVEAEVQIDRLITGRLQSLQTYVTQQLIRAAEIRASANLAATKMSECVLGQSKRV
DFCGKGYHLMSFPQSAPHGVVFLHVTYVPAQEKNFTTAPAICHDGKAHFPREGVFVSNGTHWFVT
QRNFYEPQIITTDNTFVSGNCDVVIGIVNNTVYDPLQPELDSFKEELDKYFKNHTSPDVDLGDIS
GINASVVNIQKEIDRLNEVAKNLNESLIDLQELGKYEQYIKWPWYIWLGFIAGLIAIVMVTIMLC
CMTSCCSCLKGCCSCGSCCKFDEDDSEPVLKGVKLHYT
SEQ ID NO 299: SEQ ID NO 1 + A942P + T572I +
N532P + S884C + A893C
MFVFLVLLPLVSSQCVNLTTRTQLPPAYTNSFTRGVYYPDKVFRSSVLHSTQDLFLPFFSNVTWF
HAIHVSGTNGTKRFDNPVLPFNDGVYFASTEKSNIIRGWIFGTTLDSKTQSLLIVNNATNVVIKV
CEFQFCNDPFLGVYYHKNNKSWMESEFRVYSSANNCTFEYVSQPFLMDLEGKQGNFKNLREFVFK
NIDGYFKIYSKHTPINLVRDLPQGFSALEPLVDLPIGINITRFQTLLALHRSYLTPGDSSSGWTA
GAAAYYVGYLQPRTFLLKYNENGTITDAVDCALDPLSETKCTLKSFTVEKGIYQTSNFRVQPTES
IVRFPNITNLCPFGEVFNATRFASVYAWNRKRISNCVADYSVLYNSASFSTFKCYGVSPTKLNDL
CFTNVYADSFVIRGDEVRQIAPGQTGKIADYNYKLPDDFTGCVIAWNSNNLDSKVGGNYNYLYRL
FRKSNLKPFERDISTEIYQAGSTPCNGVEGFNCYFPLQSYGFQPTNGVGYQPYRVVVLSFELLHA
PATVCGPKKSTPLVKNKCVNFNFNGLTGTGVLTESNKKFLPFQQFGRDIADITDAVRDPQTLEIL
DITPCSFGGVSVITPGTNTSNQVAVLYQDVNCTEVPVAIHADQLTPTWRVYSTGSNVFQTRAGCL
IGAEHVNNSYECDIPIGAGICASYQTQTNSPRRARSVASQSIIAYTMSLGAENSVAYSNNSIAIP
TNFTISVTTEILPVSMTKTSVDCTMYICGDSTECSNLLLQYGSFCTQLNRALTGIAVEQDKNTQE
VFAQVKQIYKTPPIKDFGGFNFSQILPDPSKPSKRSFIEDLLFNKVTLADAGFIKQYGDCLGDIA
ARDLICAQKFNGLTVLPPLLTDEMIAQYTSALLAGTITCGWTFGAGACLQIPFAMQMAYRFNGIG
VTQNVLYENQKLIANQFNSAIGKIQDSLSSTPSALGKLQDVVNQNAQALNTLVKQLSSNFGAISS
VLNDILSRLDKVEAEVQIDRLITGRLQSLQTYVTQQLIRAAEIRASANLAATKMSECVLGQSKRV
DFCGKGYHLMSFPQSAPHGVVFLHVTYVPAQEKNFTTAPAICHDGKAHFPREGVFVSNGTHWFVT
QRNFYEPQIITTDNTFVSGNCDVVIGIVNNTVYDPLQPELDSFKEELDKYFKNHTSPDVDLGDIS
GINASVVNIQKEIDRLNEVAKNLNESLIDLQELGKYEQYIKWPWYIWLGFIAGLIAIVMVTIMLC
CMTSCCSCLKGCCSCGSCCKFDEDDSEPVLKGVKLHYT
SEQ ID NO 300: SEQ ID NO 1 + A892P + D614N + T572I +
N532P
MFVFLVLLPLVSSQCVNLTTRTQLPPAYTNSFTRGVYYPDKVFRSSVLHSTQDLFLPFFSNVTWF
HAIHVSGTNGTKRFDNPVLPFNDGVYFASTEKSNIIRGWIFGTTLDSKTQSLLIVNNATNVVIKV
CEFQFCNDPFLGVYYHKNNKSWMESEFRVYSSANNCTFEYVSQPFLMDLEGKQGNFKNLREFVFK
NIDGYFKIYSKHTPINLVRDLPQGFSALEPLVDLPIGINITRFQTLLALHRSYLTPGDSSSGWTA
GAAAYYVGYLQPRTFLLKYNENGTITDAVDCALDPLSETKCTLKSFTVEKGIYQTSNFRVQPTES
IVRFPNITNLCPFGEVFNATRFASVYAWNRKRISNCVADYSVLYNSASFSTFKCYGVSPTKLNDL
CFTNVYADSFVIRGDEVRQIAPGQTGKIADYNYKLPDDFTGCVIAWNSNNLDSKVGGNYNYLYRL
FRKSNLKPFERDISTEIYQAGSTPCNGVEGFNCYFPLQSYGFQPTNGVGYQPYRVVVLSFELLHA
PATVCGPKKSTPLVKNKCVNFNFNGLTGTGVLTESNKKFLPFQQFGRDIADITDAVRDPQTLEIL
DITPCSFGGVSVITPGTNTSNQVAVLYQNVNCTEVPVAIHADQLTPTWRVYSTGSNVFQTRAGCL
IGAEHVNNSYECDIPIGAGICASYQTQTNSPRRARSVASQSIIAYTMSLGAENSVAYSNNSIAIP
TNFTISVTTEILPVSMTKTSVDCTMYICGDSTECSNLLLQYGSFCTQLNRALTGIAVEQDKNTQE
VFAQVKQIYKTPPIKDFGGFNFSQILPDPSKPSKRSFIEDLLFNKVTLADAGFIKQYGDCLGDIA
ARDLICAQKFNGLTVLPPLLTDEMIAQYTSALLAGTITSGWTFGAGPALQIPFAMQMAYRFNGIG
VTQNVLYENQKLIANQFNSAIGKIQDSLSSTASALGKLQDVVNQNAQALNTLVKQLSSNFGAISS
VLNDILSRLDKVEAEVQIDRLITGRLQSLQTYVTQQLIRAAEIRASANLAATKMSECVLGQSKRV
DFCGKGYHLMSFPQSAPHGVVFLHVTYVPAQEKNFTTAPAICHDGKAHFPREGVFVSNGTHWFVT
QRNFYEPQIITTDNTFVSGNCDVVIGIVNNTVYDPLQPELDSFKEELDKYFKNHTSPDVDLGDIS
GINASVVNIQKEIDRLNEVAKNLNESLIDLQELGKYEQYIKWPWYIWLGFIAGLIAIVMVTIMLC
CMTSCCSCLKGCCSCGSCCKFDEDDSEPVLKGVKLHYT
SEQ ID NO 301: SEQ ID NO 1 + A892P + D614N + T572I +
G880C + F888C
MFVFLVLLPLVSSQCVNLTTRTQLPPAYTNSFTRGVYYPDKVFRSSVLHSTQDLFLPFFSNVTWF
HAIHVSGTNGTKRFDNPVLPFNDGVYFASTEKSNIIRGWIFGTTLDSKTQSLLIVNNATNVVIKV
CEFQFCNDPFLGVYYHKNNKSWMESEFRVYSSANNCTFEYVSQPFLMDLEGKQGNFKNLREFVFK
NIDGYFKIYSKHTPINLVRDLPQGFSALEPLVDLPIGINITRFQTLLALHRSYLTPGDSSSGWTA
GAAAYYVGYLQPRTFLLKYNENGTITDAVDCALDPLSETKCTLKSFTVEKGIYQTSNFRVQPTES
IVRFPNITNLCPFGEVFNATRFASVYAWNRKRISNCVADYSVLYNSASFSTFKCYGVSPTKLNDL
CFTNVYADSFVIRGDEVRQIAPGQTGKIADYNYKLPDDFTGCVIAWNSNNLDSKVGGNYNYLYRL
FRKSNLKPFERDISTEIYQAGSTPCNGVEGFNCYFPLQSYGFQPTNGVGYQPYRVVVLSFELLHA
PATVCGPKKSTNLVKNKCVNFNFNGLTGTGVLTESNKKFLPFQQFGRDIADITDAVRDPQTLEIL
DITPCSFGGVSVITPGTNTSNQVAVLYQNVNCTEVPVAIHADQLTPTWRVYSTGSNVFQTRAGCL
IGAEHVNNSYECDIPIGAGICASYQTQTNSPRRARSVASQSIIAYTMSLGAENSVAYSNNSIAIP
TNFTISVTTEILPVSMTKTSVDCTMYICGDSTECSNLLLQYGSFCTQLNRALTGIAVEQDKNTQE
VFAQVKQIYKTPPIKDFGGFNFSQILPDPSKPSKRSFIEDLLFNKVTLADAGFIKQYGDCLGDIA
ARDLICAQKFNGLTVLPPLLTDEMIAQYTSALLACTITSGWTCGAGPALQIPFAMQMAYRFNGIG
VTQNVLYENQKLIANQFNSAIGKIQDSLSSTASALGKLQDVVNQNAQALNTLVKQLSSNFGAISS
VLNDILSRLDKVEAEVQIDRLITGRLQSLQTYVTQQLIRAAEIRASANLAATKMSECVLGQSKRV
DFCGKGYHLMSFPQSAPHGVVFLHVTYVPAQEKNFTTAPAICHDGKAHFPREGVFVSNGTHWFVT
QRNFYEPQIITTDNTFVSGNCDVVIGIVNNTVYDPLQPELDSFKEELDKYFKNHTSPDVDLGDIS
GINASVVNIQKEIDRLNEVAKNLNESLIDLQELGKYEQYIKWPWYIWLGFIAGLIAIVMVTIMLC
CMTSCCSCLKGCCSCGSCCKFDEDDSEPVLKGVKLHYT
SEQ ID NO 302: SEQ ID NO 1 + A892P + D614N + T572I +
S884C + A893C
MFVFLVLLPLVSSQCVNLTTRTQLPPAYTNSFTRGVYYPDKVFRSSVLHSTQDLFLPFFSNVTWF
HAIHVSGTNGTKRFDNPVLPFNDGVYFASTEKSNIIRGWIFGTTLDSKTQSLLIVNNATNVVIKV
CEFQFCNDPFLGVYYHKNNKSWMESEFRVYSSANNCTFEYVSQPFLMDLEGKQGNFKNLREFVFK
NIDGYFKIYSKHTPINLVRDLPQGFSALEPLVDLPIGINITRFQTLLALHRSYLTPGDSSSGWTA
GAAAYYVGYLQPRTFLLKYNENGTITDAVDCALDPLSETKCTLKSFTVEKGIYQTSNFRVQPTES
IVRFPNITNLCPFGEVFNATRFASVYAWNRKRISNCVADYSVLYNSASFSTFKCYGVSPTKLNDL
CFTNVYADSFVIRGDEVRQIAPGQTGKIADYNYKLPDDFTGCVIAWNSNNLDSKVGGNYNYLYRL
FRKSNLKPFERDISTEIYQAGSTPCNGVEGFNCYFPLQSYGFQPTNGVGYQPYRVVVLSFELLHA
PATVCGPKKSTNLVKNKCVNFNFNGLTGTGVLTESNKKFLPFQQFGRDIADITDAVRDPQTLEIL
DITPCSFGGVSVITPGTNTSNQVAVLYQNVNCTEVPVAIHADQLTPTWRVYSTGSNVFQTRAGCL
IGAEHVNNSYECDIPIGAGICASYQTQTNSPRRARSVASQSIIAYTMSLGAENSVAYSNNSIAIP
TNFTISVTTEILPVSMTKTSVDCTMYICGDSTECSNLLLQYGSFCTQLNRALTGIAVEQDKNTQE
VFAQVKQIYKTPPIKDFGGFNFSQILPDPSKPSKRSFIEDLLFNKVTLADAGFIKQYGDCLGDIA
ARDLICAQKFNGLTVLPPLLTDEMIAQYTSALLAGTITCGWTFGAGPCLQIPFAMQMAYRFNGIG
VTQNVLYENQKLIANQFNSAIGKIQDSLSSTASALGKLQDVVNQNAQALNTLVKQLSSNFGAISS
VLNDILSRLDKVEAEVQIDRLITGRLQSLQTYVTQQLIRAAEIRASANLAATKMSECVLGQSKRV
DFCGKGYHLMSFPQSAPHGVVFLHVTYVPAQEKNFTTAPAICHDGKAHFPREGVFVSNGTHWFVT
QRNFYEPQIITTDNTFVSGNCDVVIGIVNNTVYDPLQPELDSFKEELDKYFKNHTSPDVDLGDIS
GINASVVNIQKEIDRLNEVAKNLNESLIDLQELGKYEQYIKWPWYIWLGFIAGLIAIVMVTIMLC
CMTSCCSCLKGCCSCGSCCKFDEDDSEPVLKGVKLHYT
SEQ ID NO 303: SEQ ID NO 1 + A892P + D614N + N532P + G880C + F888C
MFVFLVLLPLVSSQCVNLTTRTQLPPAYTNSFTRGVYYPDKVFRSSVLHSTQDLFLPFFSNVTWF
HAIHVSGTNGTKRFDNPVLPFNDGVYFASTEKSNIIRGWIFGTTLDSKTQSLLIVNNATNVVIKV
CEFQFCNDPFLGVYYHKNNKSWMESEFRVYSSANNCTFEYVSQPFLMDLEGKQGNFKNLREFVFK
NIDGYFKIYSKHTPINLVRDLPQGFSALEPLVDLPIGINITRFQTLLALHRSYLTPGDSSSGWTA
GAAAYYVGYLQPRTFLLKYNENGTITDAVDCALDPLSETKCTLKSFTVEKGIYQTSNFRVQPTES
IVRFPNITNLCPFGEVFNATRFASVYAWNRKRISNCVADYSVLYNSASFSTFKCYGVSPTKLNDL
CFTNVYADSFVIRGDEVRQIAPGQTGKIADYNYKLPDDFTGCVIAWNSNNLDSKVGGNYNYLYRL
FRKSNLKPFERDISTEIYQAGSTPCNGVEGFNCYFPLQSYGFQPTNGVGYQPYRVVVLSFELLHA
PATVCGPKKSTPLVKNKCVNFNFNGLTGTGVLTESNKKFLPFQQFGRDIADTTDAVRDPQTLEIL
DITPCSFGGVSVITPGTNTSNQVAVLYQNVNCTEVPVAIHADQLTPTWRVYSTGSNVFQTRAGCL
IGAEHVNNSYECDIPIGAGICASYQTQTNSPRRARSVASQSIIAYTMSLGAENSVAYSNNSIAIP
TNFTISVTTEILPVSMTKTSVDCTMYICGDSTECSNLLLQYGSFCTQLNRALTGIAVEQDKNTQE
VFAQVKQIYKTPPIKDFGGFNFSQILPDPSKPSKRSFIEDLLFNKVTLADAGFIKQYGDCLGDIA
ARDLICAQKFNGLTVLPPLLTDEMIAQYTSALLACTITSGWTCGAGPALQIPFAMQMAYRFNGIG
VTQNVLYENQKLIANQFNSAIGKIQDSLSSTASALGKLQDVVNQNAQALNTLVKQLSSNFGAISS
VLNDILSRLDKVEAEVQIDRLITGRLQSLQTYVTQQLIRAAEIRASANLAATKMSECVLGQSKRV
DFCGKGYHLMSFPQSAPHGVVFLHVTYVPAQEKNFTTAPAICHDGKAHFPREGVFVSNGTHWFVT
QRNFYEPQIITTDNTFVSGNCDVVIGIVNNTVYDPLQPELDSFKEELDKYFKNHTSPDVDLGDIS
GINASVVNIQKEIDRLNEVAKNLNESLIDLQELGKYEQYIKWPWYIWLGFIAGLIAIVMVTIMLC
CMTSCCSCLKGCCSCGSCCKFDEDDSEPVLKGVKLHYT
SEQ ID NO 304: SEQ ID NO 1 + A892P + D614N + N532P + S884C + A893C
MFVFLVLLPLVSSQCVNLTTRTQLPPAYTNSFTRGVYYPDKVFRSSVLHSTQDLFLPFFSNVTWF
HAIHVSGTNGTKRFDNPVLPFNDGVYFASTEKSNIIRGWIFGTTLDSKTQSLLIVNNATNVVIKV
CEFQFCNDPFLGVYYHKNNKSWMESEFRVYSSANNCTFEYVSQPFLMDLEGKQGNFKNLREFVFK
NIDGYFKIYSKHTPINLVRDLPQGFSALEPLVDLPIGINITRFQTLLALHRSYLTPGDSSSGWTA
GAAAYYVGYLQPRTFLLKYNENGTITDAVDCALDPLSETKCTLKSFTVEKGIYQTSNFRVQPTES
IVRFPNITNLCPFGEVFNATRFASVYAWNRKRISNCVADYSVLYNSASFSTFKCYGVSPTKLNDL
CFTNVYADSFVIRGDEVRQIAPGQTGKIADYNYKLPDDFTGCVIAWNSNNLDSKVGGNYNYLYRL
FRKSNLKPFERDISTEIYQAGSTPCNGVEGFNCYFPLQSYGFQPTNGVGYQPYRVVVLSFELLHA
PATVCGPKKSTPLVKNKCVNFNFNGLTGTGVLTESNKKFLPFQQFGRDIADTTDAVRDPQTLEIL
DITPCSFGGVSVITPGTNTSNQVAVLYQNVNCTEVPVAIHADQLTPTWRVYSTGSNVFQTRAGCL
IGAEHVNNSYECDIPIGAGICASYQTQTNSPRRARSVASQSIIAYTMSLGAENSVAYSNNSIAIP
TNFTISVTTEILPVSMTKTSVDCTMYICGDSTECSNLLLQYGSFCTQLNRALTGIAVEQDKNTQE
VFAQVKQIYKTPPIKDFGGFNFSQILPDPSKPSKRSFIEDLLFNKVTLADAGFIKQYGDCLGDIA
ARDLICAQKFNGLTVLPPLLTDEMIAQYTSALLAGTITCGWTFGAGPCLQIPFAMQMAYRFNGIG
VTQNVLYENQKLIANQFNSAIGKIQDSLSSTASALGKLQDVVNQNAQALNTLVKQLSSNFGAISS
VLNDILSRLDKVEAEVQIDRLITGRLQSLQTYVTQQLIRAAEIRASANLAATKMSECVLGQSKRV
DFCGKGYHLMSFPQSAPHGVVFLHVTYVPAQEKNFTTAPAICHDGKAHFPREGVFVSNGTHWFVT
QRNFYEPQIITTDNTFVSGNCDVVIGIVNNTVYDPLQPELDSFKEELDKYFKNHTSPDVDLGDIS
GINASVVNIQKEIDRLNEVAKNLNESLIDLQELGKYEQYIKWPWYIWLGFIAGLIAIVMVTIMLC
CMTSCCSCLKGCCSCGSCCKFDEDDSEPVLKGVKLHYT
SEQ ID NO 305: SEQ ID NO 1 + A892P + T572I +
N532P + G880C + F888C
MFVFLVLLPLVSSQCVNLTTRTQLPPAYTNSFTRGVYYPDKVFRSSVLHSTQDLFLPFFSNVTWF
HAIHVSGTNGTKRFDNPVLPFNDGVYFASTEKSNIIRGWIFGTTLDSKTQSLLIVNNATNVVIKV
CEFQFCNDPFLGVYYHKNNKSWMESEFRVYSSANNCTFEYVSQPFLMDLEGKQGNFKNLREFVFK
NIDGYFKIYSKHTPINLVRDLPQGFSALEPLVDLPIGINITRFQTLLALHRSYLTPGDSSSGWTA
GAAAYYVGYLQPRTFLLKYNENGTITDAVDCALDPLSETKCTLKSFTVEKGIYQTSNFRVQPTES
IVRFPNITNLCPFGEVFNATRFASVYAWNRKRISNCVADYSVLYNSASFSTFKCYGVSPTKLNDL
CFTNVYADSFVIRGDEVRQIAPGQTGKIADYNYKLPDDFTGCVIAWNSNNLDSKVGGNYNYLYRL
FRKSNLKPFERDISTEIYQAGSTPCNGVEGFNCYFPLQSYGFQPTNGVGYQPYRVVVLSFELLHA
PATVCGPKKSTPLVKNKCVNFNFNGLTGTGVLTESNKKFLPFQQFGRDIADITDAVRDPQTLEIL
DITPCSFGGVSVITPGTNTSNQVAVLYQDVNCTEVPVAIHADQLTPTWRVYSTGSNVFQTRAGCL
IGAEHVNNSYECDIPIGAGICASYQTQTNSPRRARSVASQSIIAYTMSLGAENSVAYSNNSIAIP
TNFTISVTTEILPVSMTKTSVDCTMYICGDSTECSNLLLQYGSFCTQLNRALTGIAVEQDKNTQE
VFAQVKQIYKTPPIKDFGGFNFSQILPDPSKPSKRSFIEDLLFNKVTLADAGFIKQYGDCLGDIA
ARDLICAQKFNGLTVLPPLLTDEMIAQYTSALLACTITSGWTCGAGPALQIPFAMQMAYRFNGIG
VTQNVLYENQKLIANQFNSAIGKIQDSLSSTASALGKLQDVVNQNAQALNTLVKQLSSNFGAISS
VLNDILSRLDKVEAEVQIDRLITGRLQSLQTYVTQQLIRAAEIRASANLAATKMSECVLGQSKRV
DFCGKGYHLMSFPQSAPHGVVFLHVTYVPAQEKNFTTAPAICHDGKAHFPREGVFVSNGTHWFVT
QRNFYEPQIITTDNTFVSGNCDVVIGIVNNTVYDPLQPELDSFKEELDKYFKNHTSPDVDLGDIS
GINASVVNIQKEIDRLNEVAKNLNESLIDLQELGKYEQYIKWPWYIWLGFIAGLIAIVMVTIMLC
CMTSCCSCLKGCCSCGSCCKFDEDDSEPVLKGVKLHYT
SEQ ID NO 306: SEQ ID NO 1 + A892P + T572I +
N532P + S884C + A893C
MFVFLVLLPLVSSQCVNLTTRTQLPPAYTNSFTRGVYYPDKVFRSSVLHSTQDLFLPFFSNVTWF
HAIHVSGTNGTKRFDNPVLPFNDGVYFASTEKSNIIRGWIFGTTLDSKTQSLLIVNNATNVVIKV
CEFQFCNDPFLGVYYHKNNKSWMESEFRVYSSANNCTFEYVSQPFLMDLEGKQGNFKNLREFVFK
NIDGYFKIYSKHTPINLVRDLPQGFSALEPLVDLPIGINITRFQTLLALHRSYLTPGDSSSGWTA
GAAAYYVGYLQPRTFLLKYNENGTITDAVDCALDPLSETKCTLKSFTVEKGIYQTSNFRVQPTES
IVRFPNITNLCPFGEVFNATRFASVYAWNRKRISNCVADYSVLYNSASFSTFKCYGVSPTKLNDL
CFTNVYADSFVIRGDEVRQIAPGQTGKIADYNYKLPDDFTGCVIAWNSNNLDSKVGGNYNYLYRL
FRKSNLKPFERDISTEIYQAGSTPCNGVEGFNCYFPLQSYGFQPTNGVGYQPYRVVVLSFELLHA
PATVCGPKKSTPLVKNKCVNFNFNGLTGTGVLTESNKKFLPFQQFGRDIADITDAVRDPQTLEIL
DITPCSFGGVSVITPGTNTSNQVAVLYQDVNCTEVPVAIHADQLTPTWRVYSTGSNVFQTRAGCL
IGAEHVNNSYECDIPIGAGICASYQTQTNSPRRARSVASQSIIAYTMSLGAENSVAYSNNSIAIP
TNFTISVTTEILPVSMTKTSVDCTMYICGDSTECSNLLLQYGSFCTQLNRALTGIAVEQDKNTQE
VFAQVKQIYKTPPIKDFGGFNFSQILPDPSKPSKRSFIEDLLFNKVTLADAGFIKQYGDCLGDIA
ARDLICAQKFNGLTVLPPLLTDEMIAQYTSALLAGTITCGWTFGAGPCLQIPFAMQMAYRFNGIG
VTQNVLYENQKLIANQFNSAIGKIQDSLSSTASALGKLQDVVNQNAQALNTLVKQLSSNFGAISS
VLNDILSRLDKVEAEVQIDRLITGRLQSLQTYVTQQLIRAAEIRASANLAATKMSECVLGQSKRV
DFCGKGYHLMSFPQSAPHGVVFLHVTYVPAQEKNFTTAPAICHDGKAHFPREGVFVSNGTHWFVT
QRNFYEPQIITTDNTFVSGNCDVVIGIVNNTVYDPLQPELDSFKEELDKYFKNHTSPDVDLGDIS
GINASVVNIQKEIDRLNEVAKNLNESLIDLQELGKYEQYIKWPWYIWLGFIAGLIAIVMVTIMLC
CMTSCCSCLKGCCSCGSCCKFDEDDSEPVLKGVKLHYT
SEQ ID NO 307: SEQ ID NO 1 + D614N + T572I +
N532P + G880C + F888C
MFVFLVLLPLVSSQCVNLTTRTQLPPAYTNSFTRGVYYPDKVFRSSVLHSTQDLFLPFFSNVTWF
HAIHVSGTNGTKRFDNPVLPFNDGVYFASTEKSNIIRGWIFGTTLDSKTQSLLIVNNATNVVIKV
CEFQFCNDPFLGVYYHKNNKSWMESEFRVYSSANNCTFEYVSQPFLMDLEGKQGNFKNLREFVFK
NIDGYFKIYSKHTPINLVRDLPQGFSALEPLVDLPIGINITRFQTLLALHRSYLTPGDSSSGWTA
GAAAYYVGYLQPRTFLLKYNENGTITDAVDCALDPLSETKCTLKSFTVEKGIYQTSNFRVQPTES
IVRFPNITNLCPFGEVFNATRFASVYAWNRKRISNCVADYSVLYNSASFSTFKCYGVSPTKLNDL
CFTNVYADSFVIRGDEVRQIAPGQTGKIADYNYKLPDDFTGCVIAWNSNNLDSKVGGNYNYLYRL
FRKSNLKPFERDISTEIYQAGSTPCNGVEGFNCYFPLQSYGFQPTNGVGYQPYRVVVLSFELLHA
PATVCGPKKSTPLVKNKCVNFNFNGLTGTGVLTESNKKFLPFQQFGRDIADITDAVRDPQTLEIL
DITPCSFGGVSVITPGTNTSNQVAVLYQNVNCTEVPVAIHADQLTPTWRVYSTGSNVFQTRAGCL
IGAEHVNNSYECDIPIGAGICASYQTQTNSPRRARSVASQSIIAYTMSLGAENSVAYSNNSIAIP
TNFTISVTTEILPVSMTKTSVDCTMYICGDSTECSNLLLQYGSFCTQLNRALTGIAVEQDKNTQE
VFAQVKQIYKTPPIKDFGGFNFSQILPDPSKPSKRSFIEDLLFNKVTLADAGFIKQYGDCLGDIA
ARDLICAQKFNGLTVLPPLLTDEMIAQYTSALLACTITSGWTCGAGAALQIPFAMQMAYRFNGIG
VTQNVLYENQKLIANQFNSAIGKIQDSLSSTASALGKLQDVVNQNAQALNTLVKQLSSNFGAISS
VLNDILSRLDKVEAEVQIDRLITGRLQSLQTYVTQQLIRAAEIRASANLAATKMSECVLGQSKRV
DFCGKGYHLMSFPQSAPHGVVFLHVTYVPAQEKNFTTAPAICHDGKAHFPREGVFVSNGTHWFVT
QRNFYEPQIITTDNTFVSGNCDVVIGIVNNTVYDPLQPELDSFKEELDKYFKNHTSPDVDLGDIS
GINASVVNIQKEIDRLNEVAKNLNESLIDLQELGKYEQYIKWPWYIWLGFIAGLIAIVMVTIMLC
CMTSCCSCLKGCCSCGSCCKFDEDDSEPVLKGVKLHYT
SEQ ID NO 308: SEQ ID NO 1 + D614N + T572I +
N532P + S884C + A893C
MFVFLVLLPLVSSQCVNLTTRTQLPPAYTNSFTRGVYYPDKVFRSSVLHSTQDLFLPFFSNVTWF
HAIHVSGTNGTKRFDNPVLPFNDGVYFASTEKSNIIRGWIFGTTLDSKTQSLLIVNNATNVVIKV
CEFQFCNDPFLGVYYHKNNKSWMESEFRVYSSANNCTFEYVSQPFLMDLEGKQGNFKNLREFVFK
NIDGYFKIYSKHTPINLVRDLPQGFSALEPLVDLPIGINITRFQTLLALHRSYLTPGDSSSGWTA
GAAAYYVGYLQPRTFLLKYNENGTITDAVDCALDPLSETKCTLKSFTVEKGIYQTSNFRVQPTES
IVRFPNITNLCPFGEVFNATRFASVYAWNRKRISNCVADYSVLYNSASFSTFKCYGVSPTKLNDL
CFTNVYADSFVIRGDEVRQIAPGQTGKIADYNYKLPDDFTGCVIAWNSNNLDSKVGGNYNYLYRL
FRKSNLKPFERDISTEIYQAGSTPCNGVEGFNCYFPLQSYGFQPTNGVGYQPYRVVVLSFELLHA
PATVCGPKKSTPLVKNKCVNFNFNGLTGTGVLTESNKKFLPFQQFGRDIADITDAVRDPQTLEIL
DITPCSFGGVSVITPGTNTSNQVAVLYQNVNCTEVPVAIHADQLTPTWRVYSTGSNVFQTRAGCL
IGAEHVNNSYECDIPIGAGICASYQTQTNSPRRARSVASQSIIAYTMSLGAENSVAYSNNSIAIP
TNFTISVTTEILPVSMTKTSVDCTMYICGDSTECSNLLLQYGSFCTQLNRALTGIAVEQDKNTQE
VFAQVKQIYKTPPIKDFGGFNFSQILPDPSKPSKRSFIEDLLFNKVTLADAGFIKQYGDCLGDIA
ARDLICAQKFNGLTVLPPLLTDEMIAQYTSALLAGTITCGWTFGAGACLQIPFAMQMAYRFNGIG
VTQNVLYENQKLIANQFNSAIGKIQDSLSSTASALGKLQDVVNQNAQALNTLVKQLSSNFGAISS
VLNDILSRLDKVEAEVQIDRLITGRLQSLQTYVTQQLIRAAEIRASANLAATKMSECVLGQSKRV
DFCGKGYHLMSFPQSAPHGVVFLHVTYVPAQEKNFTTAPAICHDGKAHFPREGVFVSNGTHWFVT
QRNFYEPQIITTDNTFVSGNCDVVIGIVNNTVYDPLQPELDSFKEELDKYFKNHTSPDVDLGDIS
GINASVVNIQKEIDRLNEVAKNLNESLIDLQELGKYEQYIKWPWYIWLGFIAGLIAIVMVTIMLC
CMTSCCSCLKGCCSCGSCCKFDEDDSEPVLKGVKLHYT
SEQ ID NO 309: SEQ ID NO 1 + A942P + A892P + D614N + T572I +
N532P
MFVFLVLLPLVSSQCVNLTTRTQLPPAYTNSFTRGVYYPDKVFRSSVLHSTQDLFLPFFSNVTWF
HAIHVSGTNGTKRFDNPVLPFNDGVYFASTEKSNIIRGWIFGTTLDSKTQSLLIVNNATNVVIKV
CEFQFCNDPFLGVYYHKNNKSWMESEFRVYSSANNCTFEYVSQPFLMDLEGKQGNFKNLREFVFK
NIDGYFKIYSKHTPINLVRDLPQGFSALEPLVDLPIGINITRFQTLLALHRSYLTPGDSSSGWTA
GAAAYYVGYLQPRTFLLKYNENGTITDAVDCALDPLSETKCTLKSFTVEKGIYQTSNFRVQPTES
IVRFPNITNLCPFGEVFNATRFASVYAWNRKRISNCVADYSVLYNSASFSTFKCYGVSPTKLNDL
CFTNVYADSFVIRGDEVRQIAPGQTGKIADYNYKLPDDFTGCVIAWNSNNLDSKVGGNYNYLYRL
FRKSNLKPFERDISTEIYQAGSTPCNGVEGFNCYFPLQSYGFQPTNGVGYQPYRVVVLSFELLHA
PATVCGPKKSTPLVKNKCVNFNFNGLTGTGVLTESNKKFLPFQQFGRDIADITDAVRDPQTLEIL
DITPCSFGGVSVITPGTNTSNQVAVLYQNVNCTEVPVAIHADQLTPTWRVYSTGSNVFQTRAGCL
IGAEHVNNSYECDIPIGAGICASYQTQTNSPRRARSVASQSIIAYTMSLGAENSVAYSNNSIAIP
TNFTISVTTEILPVSMTKTSVDCTMYICGDSTECSNLLLQYGSFCTQLNRALTGIAVEQDKNTQE
VFAQVKQIYKTPPIKDFGGFNFSQILPDPSKPSKRSFIEDLLFNKVTLADAGFIKQYGDCLGDIA
ARDLICAQKFNGLTVLPPLLTDEMIAQYTSALLAGTITSGWTFGAGPALQIPFAMQMAYRFNGIG
VTQNVLYENQKLIANQFNSAIGKIQDSLSSTPSALGKLQDVVNQNAQALNTLVKQLSSNFGAISS
VLNDILSRLDKVEAEVQIDRLITGRLQSLQTYVTQQLIRAAEIRASANLAATKMSECVLGQSKRV
DFCGKGYHLMSFPQSAPHGVVFLHVTYVPAQEKNFTTAPAICHDGKAHFPREGVFVSNGTHWFVT
QRNFYEPQIITTDNTFVSGNCDVVIGIVNNTVYDPLQPELDSFKEELDKYFKNHTSPDVDLGDIS
GINASVVNIQKEIDRLNEVAKNLNESLIDLQELGKYEQYIKWPWYIWLGFIAGLIAIVMVTIMLC
CMTSCCSCLKGCCSCGSCCKFDEDDSEPVLKGVKLHYT
SEQ ID NO 310: SEQ ID NO 1 + A942P + A892P + D614N + T572I +
G880C + F888C
MFVFLVLLPLVSSQCVNLTTRTQLPPAYTNSFTRGVYYPDKVFRSSVLHSTQDLFLPFFSNVTWF
HAIHVSGTNGTKRFDNPVLPFNDGVYFASTEKSNIIRGWIFGTTLDSKTQSLLIVNNATNVVIKV
CEFQFCNDPFLGVYYHKNNKSWMESEFRVYSSANNCTFEYVSQPFLMDLEGKQGNFKNLREFVFK
NIDGYFKIYSKHTPINLVRDLPQGFSALEPLVDLPIGINITRFQTLLALHRSYLTPGDSSSGWTA
GAAAYYVGYLQPRTFLLKYNENGTITDAVDCALDPLSETKCTLKSFTVEKGIYQTSNFRVQPTES
IVRFPNITNLCPFGEVFNATRFASVYAWNRKRISNCVADYSVLYNSASFSTFKCYGVSPTKLNDL
CFTNVYADSFVIRGDEVRQIAPGQTGKIADYNYKLPDDFTGCVIAWNSNNLDSKVGGNYNYLYRL
FRKSNLKPFERDISTEIYQAGSTPCNGVEGFNCYFPLQSYGFQPTNGVGYQPYRVVVLSFELLHA
PATVCGPKKSTNLVKNKCVNFNFNGLTGTGVLTESNKKFLPFQQFGRDIADITDAVRDPQTLEIL
DITPCSFGGVSVITPGTNTSNQVAVLYQNVNCTEVPVAIHADQLTPTWRVYSTGSNVFQTRAGCL
IGAEHVNNSYECDIPIGAGICASYQTQTNSPRRARSVASQSIIAYTMSLGAENSVAYSNNSIAIP
TNFTISVTTEILPVSMTKTSVDCTMYICGDSTECSNLLLQYGSFCTQLNRALTGIAVEQDKNTQE
VFAQVKQIYKTPPIKDFGGFNFSQILPDPSKPSKRSFIEDLLFNKVTLADAGFIKQYGDCLGDIA
ARDLICAQKFNGLTVLPPLLTDEMIAQYTSALLACTITSGWTCGAGPALQIPFAMQMAYRFNGIG
VTQNVLYENQKLIANQFNSAIGKIQDSLSSTPSALGKLQDVVNQNAQALNTLVKQLSSNFGAISS
VLNDILSRLDKVEAEVQIDRLITGRLQSLQTYVTQQLIRAAEIRASANLAATKMSECVLGQSKRV
DFCGKGYHLMSFPQSAPHGVVFLHVTYVPAQEKNFTTAPAICHDGKAHFPREGVFVSNGTHWFVT
QRNFYEPQIITTDNTFVSGNCDVVIGIVNNTVYDPLQPELDSFKEELDKYFKNHTSPDVDLGDIS
GINASVVNIQKEIDRLNEVAKNLNESLIDLQELGKYEQYIKWPWYIWLGFIAGLIAIVMVTIMLC
CMTSCCSCLKGCCSCGSCCKFDEDDSEPVLKGVKLHYT
SEQ ID NO 311: SEQ ID NO 1 + A942P + A892P + D614N + T572I +
S884C + A893C
MFVFLVLLPLVSSQCVNLTTRTQLPPAYTNSFTRGVYYPDKVFRSSVLHSTQDLFLPFFSNVTWF
HAIHVSGTNGTKRFDNPVLPFNDGVYFASTEKSNIIRGWIFGTTLDSKTQSLLIVNNATNVVIKV
CEFQFCNDPFLGVYYHKNNKSWMESEFRVYSSANNCTFEYVSQPFLMDLEGKQGNFKNLREFVFK
NIDGYFKIYSKHTPINLVRDLPQGFSALEPLVDLPIGINITRFQTLLALHRSYLTPGDSSSGWTA
GAAAYYVGYLQPRTFLLKYNENGTITDAVDCALDPLSETKCTLKSFTVEKGIYQTSNFRVQPTES
IVRFPNITNLCPFGEVFNATRFASVYAWNRKRISNCVADYSVLYNSASFSTFKCYGVSPTKLNDL
CFTNVYADSFVIRGDEVRQIAPGQTGKIADYNYKLPDDFTGCVIAWNSNNLDSKVGGNYNYLYRL
FRKSNLKPFERDISTEIYQAGSTPCNGVEGFNCYFPLQSYGFQPTNGVGYQPYRVVVLSFELLHA
PATVCGPKKSTNLVKNKCVNFNFNGLTGTGVLTESNKKFLPFQQFGRDIADITDAVRDPQTLEIL
DITPCSFGGVSVITPGTNTSNQVAVLYQNVNCTEVPVAIHADQLTPTWRVYSTGSNVFQTRAGCL
IGAEHVNNSYECDIPIGAGICASYQTQTNSPRRARSVASQSIIAYTMSLGAENSVAYSNNSIAIP
TNFTISVTTEILPVSMTKTSVDCTMYICGDSTECSNLLLQYGSFCTQLNRALTGIAVEQDKNTQE
VFAQVKQIYKTPPIKDFGGFNFSQILPDPSKPSKRSFIEDLLFNKVTLADAGFIKQYGDCLGDIA
ARDLICAQKFNGLTVLPPLLTDEMIAQYTSALLAGTITCGWTFGAGPCLQIPFAMQMAYRFNGIG
VTQNVLYENQKLIANQFNSAIGKIQDSLSSTPSALGKLQDVVNQNAQALNTLVKQLSSNFGAISS
VLNDILSRLDKVEAEVQIDRLITGRLQSLQTYVTQQLIRAAEIRASANLAATKMSECVLGQSKRV
DFCGKGYHLMSFPQSAPHGVVFLHVTYVPAQEKNFTTAPAICHDGKAHFPREGVFVSNGTHWFVT
QRNFYEPQIITTDNTFVSGNCDVVIGIVNNTVYDPLQPELDSFKEELDKYFKNHTSPDVDLGDIS
GINASVVNIQKEIDRLNEVAKNLNESLIDLQELGKYEQYIKWPWYIWLGFIAGLIAIVMVTIMLC
CMTSCCSCLKGCCSCGSCCKFDEDDSEPVLKGVKLHYT
SEQ ID NO 312: SEQ ID NO 1 + A942P + A892P + D614N + N532P + G880C + F888C
MFVFLVLLPLVSSQCVNLTTRTQLPPAYTNSFTRGVYYPDKVFRSSVLHSTQDLFLPFFSNVTWF
HAIHVSGTNGTKRFDNPVLPFNDGVYFASTEKSNIIRGWIFGTTLDSKTQSLLIVNNATNVVIKV
CEFQFCNDPFLGVYYHKNNKSWMESEFRVYSSANNCTFEYVSQPFLMDLEGKQGNFKNLREFVFK
NIDGYFKIYSKHTPINLVRDLPQGFSALEPLVDLPIGINITRFQTLLALHRSYLTPGDSSSGWTA
GAAAYYVGYLQPRTFLLKYNENGTITDAVDCALDPLSETKCTLKSFTVEKGIYQTSNFRVQPTES
IVRFPNITNLCPFGEVFNATRFASVYAWNRKRISNCVADYSVLYNSASFSTFKCYGVSPTKLNDL
CFTNVYADSFVIRGDEVRQIAPGQTGKIADYNYKLPDDFTGCVIAWNSNNLDSKVGGNYNYLYRL
FRKSNLKPFERDISTEIYQAGSTPCNGVEGFNCYFPLQSYGFQPTNGVGYQPYRVVVLSFELLHA
PATVCGPKKSTPLVKNKCVNFNFNGLTGTGVLTESNKKFLPFQQFGRDIADTTDAVRDPQTLEIL
DITPCSFGGVSVITPGTNTSNQVAVLYQNVNCTEVPVAIHADQLTPTWRVYSTGSNVFQTRAGCL
IGAEHVNNSYECDIPIGAGICASYQTQTNSPRRARSVASQSIIAYTMSLGAENSVAYSNNSIAIP
TNFTISVTTEILPVSMTKTSVDCTMYICGDSTECSNLLLQYGSFCTQLNRALTGIAVEQDKNTQE
VFAQVKQIYKTPPIKDFGGFNFSQILPDPSKPSKRSFIEDLLFNKVTLADAGFIKQYGDCLGDIA
ARDLICAQKFNGLTVLPPLLTDEMIAQYTSALLACTITSGWTCGAGPALQIPFAMQMAYRFNGIG
VTQNVLYENQKLIANQFNSAIGKIQDSLSSTPSALGKLQDVVNQNAQALNTLVKQLSSNFGAISS
VLNDILSRLDKVEAEVQIDRLITGRLQSLQTYVTQQLIRAAEIRASANLAATKMSECVLGQSKRV
DFCGKGYHLMSFPQSAPHGVVFLHVTYVPAQEKNFTTAPAICHDGKAHFPREGVFVSNGTHWFVT
QRNFYEPQIITTDNTFVSGNCDVVIGIVNNTVYDPLQPELDSFKEELDKYFKNHTSPDVDLGDIS
GINASVVNIQKEIDRLNEVAKNLNESLIDLQELGKYEQYIKWPWYIWLGFIAGLIAIVMVTIMLC
CMTSCCSCLKGCCSCGSCCKFDEDDSEPVLKGVKLHYT
SEQ ID NO 313: SEQ ID NO 1 + A942P + A892P + D614N + N532P + S884C + A893C
MFVFLVLLPLVSSQCVNLTTRTQLPPAYTNSFTRGVYYPDKVFRSSVLHSTQDLFLPFFSNVTWF
HAIHVSGTNGTKRFDNPVLPFNDGVYFASTEKSNIIRGWIFGTTLDSKTQSLLIVNNATNVVIKV
CEFQFCNDPFLGVYYHKNNKSWMESEFRVYSSANNCTFEYVSQPFLMDLEGKQGNFKNLREFVFK
NIDGYFKIYSKHTPINLVRDLPQGFSALEPLVDLPIGINITRFQTLLALHRSYLTPGDSSSGWTA
GAAAYYVGYLQPRTFLLKYNENGTITDAVDCALDPLSETKCTLKSFTVEKGIYQTSNFRVQPTES
IVRFPNITNLCPFGEVFNATRFASVYAWNRKRISNCVADYSVLYNSASFSTFKCYGVSPTKLNDL
CFTNVYADSFVIRGDEVRQIAPGQTGKIADYNYKLPDDFTGCVIAWNSNNLDSKVGGNYNYLYRL
FRKSNLKPFERDISTEIYQAGSTPCNGVEGFNCYFPLQSYGFQPTNGVGYQPYRVVVLSFELLHA
PATVCGPKKSTPLVKNKCVNFNFNGLTGTGVLTESNKKFLPFQQFGRDIADTTDAVRDPQTLEIL
DITPCSFGGVSVITPGTNTSNQVAVLYQNVNCTEVPVAIHADQLTPTWRVYSTGSNVFQTRAGCL
IGAEHVNNSYECDIPIGAGICASYQTQTNSPRRARSVASQSIIAYTMSLGAENSVAYSNNSIAIP
TNFTISVTTEILPVSMTKTSVDCTMYICGDSTECSNLLLQYGSFCTQLNRALTGIAVEQDKNTQE
VFAQVKQIYKTPPIKDFGGFNFSQILPDPSKPSKRSFIEDLLFNKVTLADAGFIKQYGDCLGDIA
ARDLICAQKFNGLTVLPPLLTDEMIAQYTSALLAGTITCGWTFGAGPCLQIPFAMQMAYRFNGIG
VTQNVLYENQKLIANQFNSAIGKIQDSLSSTPSALGKLQDVVNQNAQALNTLVKQLSSNFGAISS
VLNDILSRLDKVEAEVQIDRLITGRLQSLQTYVTQQLIRAAEIRASANLAATKMSECVLGQSKRV
DFCGKGYHLMSFPQSAPHGVVFLHVTYVPAQEKNFTTAPAICHDGKAHFPREGVFVSNGTHWFVT
QRNFYEPQIITTDNTFVSGNCDVVIGIVNNTVYDPLQPELDSFKEELDKYFKNHTSPDVDLGDIS
GINASVVNIQKEIDRLNEVAKNLNESLIDLQELGKYEQYIKWPWYIWLGFIAGLIAIVMVTIMLC
CMTSCCSCLKGCCSCGSCCKFDEDDSEPVLKGVKLHYT
SEQ ID NO 314: SEQ ID NO 1 + A942P + A892P + T572I +
N532P + G880C + F888C
MFVFLVLLPLVSSQCVNLTTRTQLPPAYTNSFTRGVYYPDKVFRSSVLHSTQDLFLPFFSNVTWF
HAIHVSGTNGTKRFDNPVLPFNDGVYFASTEKSNIIRGWIFGTTLDSKTQSLLIVNNATNVVIKV
CEFQFCNDPFLGVYYHKNNKSWMESEFRVYSSANNCTFEYVSQPFLMDLEGKQGNFKNLREFVFK
NIDGYFKIYSKHTPINLVRDLPQGFSALEPLVDLPIGINITRFQTLLALHRSYLTPGDSSSGWTA
GAAAYYVGYLQPRTFLLKYNENGTITDAVDCALDPLSETKCTLKSFTVEKGIYQTSNFRVQPTES
IVRFPNITNLCPFGEVFNATRFASVYAWNRKRISNCVADYSVLYNSASFSTFKCYGVSPTKLNDL
CFTNVYADSFVIRGDEVRQIAPGQTGKIADYNYKLPDDFTGCVIAWNSNNLDSKVGGNYNYLYRL
FRKSNLKPFERDISTEIYQAGSTPCNGVEGFNCYFPLQSYGFQPTNGVGYQPYRVVVLSFELLHA
PATVCGPKKSTPLVKNKCVNFNFNGLTGTGVLTESNKKFLPFQQFGRDIADITDAVRDPQTLEIL
DITPCSFGGVSVITPGTNTSNQVAVLYQDVNCTEVPVAIHADQLTPTWRVYSTGSNVFQTRAGCL
IGAEHVNNSYECDIPIGAGICASYQTQTNSPRRARSVASQSIIAYTMSLGAENSVAYSNNSIAIP
TNFTISVTTEILPVSMTKTSVDCTMYICGDSTECSNLLLQYGSFCTQLNRALTGIAVEQDKNTQE
VFAQVKQIYKTPPIKDFGGFNFSQILPDPSKPSKRSFIEDLLFNKVTLADAGFIKQYGDCLGDIA
ARDLICAQKFNGLTVLPPLLTDEMIAQYTSALLACTITSGWTCGAGPALQIPFAMQMAYRFNGIG
VTQNVLYENQKLIANQFNSAIGKIQDSLSSTPSALGKLQDVVNQNAQALNTLVKQLSSNFGAISS
VLNDILSRLDKVEAEVQIDRLITGRLQSLQTYVTQQLIRAAEIRASANLAATKMSECVLGQSKRV
DFCGKGYHLMSFPQSAPHGVVFLHVTYVPAQEKNFTTAPAICHDGKAHFPREGVFVSNGTHWFVT
QRNFYEPQIITTDNTFVSGNCDVVIGIVNNTVYDPLQPELDSFKEELDKYFKNHTSPDVDLGDIS
GINASVVNIQKEIDRLNEVAKNLNESLIDLQELGKYEQYIKWPWYIWLGFIAGLIAIVMVTIMLC
CMTSCCSCLKGCCSCGSCCKFDEDDSEPVLKGVKLHYT
SEQ ID NO 315: SEQ ID NO 1 + A942P + A892P + T572I +
N532P + S884C + A893C
MFVFLVLLPLVSSQCVNLTTRTQLPPAYTNSFTRGVYYPDKVFRSSVLHSTQDLFLPFFSNVTWF
HAIHVSGTNGTKRFDNPVLPFNDGVYFASTEKSNIIRGWIFGTTLDSKTQSLLIVNNATNVVIKV
CEFQFCNDPFLGVYYHKNNKSWMESEFRVYSSANNCTFEYVSQPFLMDLEGKQGNFKNLREFVFK
NIDGYFKIYSKHTPINLVRDLPQGFSALEPLVDLPIGINITRFQTLLALHRSYLTPGDSSSGWTA
GAAAYYVGYLQPRTFLLKYNENGTITDAVDCALDPLSETKCTLKSFTVEKGIYQTSNFRVQPTES
IVRFPNITNLCPFGEVFNATRFASVYAWNRKRISNCVADYSVLYNSASFSTFKCYGVSPTKLNDL
CFTNVYADSFVIRGDEVRQIAPGQTGKIADYNYKLPDDFTGCVIAWNSNNLDSKVGGNYNYLYRL
FRKSNLKPFERDISTEIYQAGSTPCNGVEGFNCYFPLQSYGFQPTNGVGYQPYRVVVLSFELLHA
PATVCGPKKSTPLVKNKCVNFNFNGLTGTGVLTESNKKFLPFQQFGRDIADITDAVRDPQTLEIL
DITPCSFGGVSVITPGTNTSNQVAVLYQDVNCTEVPVAIHADQLTPTWRVYSTGSNVFQTRAGCL
IGAEHVNNSYECDIPIGAGICASYQTQTNSPRRARSVASQSIIAYTMSLGAENSVAYSNNSIAIP
TNFTISVTTEILPVSMTKTSVDCTMYICGDSTECSNLLLQYGSFCTQLNRALTGIAVEQDKNTQE
VFAQVKQIYKTPPIKDFGGFNFSQILPDPSKPSKRSFIEDLLFNKVTLADAGFIKQYGDCLGDIA
ARDLICAQKFNGLTVLPPLLTDEMIAQYTSALLAGTITCGWTFGAGPCLQIPFAMQMAYRFNGIG
VTQNVLYENQKLIANQFNSAIGKIQDSLSSTPSALGKLQDVVNQNAQALNTLVKQLSSNFGAISS
VLNDILSRLDKVEAEVQIDRLITGRLQSLQTYVTQQLIRAAEIRASANLAATKMSECVLGQSKRV
DFCGKGYHLMSFPQSAPHGVVFLHVTYVPAQEKNFTTAPAICHDGKAHFPREGVFVSNGTHWFVT
QRNFYEPQIITTDNTFVSGNCDVVIGIVNNTVYDPLQPELDSFKEELDKYFKNHTSPDVDLGDIS
GINASVVNIQKEIDRLNEVAKNLNESLIDLQELGKYEQYIKWPWYIWLGFIAGLIAIVMVTIMLC
CMTSCCSCLKGCCSCGSCCKFDEDDSEPVLKGVKLHYT
SEQ ID NO 316: SEQ ID NO 1 + A942P + D614N + T572I +
N532P + G880C + F888C
MFVFLVLLPLVSSQCVNLTTRTQLPPAYTNSFTRGVYYPDKVFRSSVLHSTQDLFLPFFSNVTWF
HAIHVSGTNGTKRFDNPVLPFNDGVYFASTEKSNIIRGWIFGTTLDSKTQSLLIVNNATNVVIKV
CEFQFCNDPFLGVYYHKNNKSWMESEFRVYSSANNCTFEYVSQPFLMDLEGKQGNFKNLREFVFK
NIDGYFKIYSKHTPINLVRDLPQGFSALEPLVDLPIGINITRFQTLLALHRSYLTPGDSSSGWTA
GAAAYYVGYLQPRTFLLKYNENGTITDAVDCALDPLSETKCTLKSFTVEKGIYQTSNFRVQPTES
IVRFPNITNLCPFGEVFNATRFASVYAWNRKRISNCVADYSVLYNSASFSTFKCYGVSPTKLNDL
CFTNVYADSFVIRGDEVRQIAPGQTGKIADYNYKLPDDFTGCVIAWNSNNLDSKVGGNYNYLYRL
FRKSNLKPFERDISTEIYQAGSTPCNGVEGFNCYFPLQSYGFQPTNGVGYQPYRVVVLSFELLHA
PATVCGPKKSTPLVKNKCVNFNFNGLTGTGVLTESNKKFLPFQQFGRDIADITDAVRDPQTLEIL
DITPCSFGGVSVITPGTNTSNQVAVLYQNVNCTEVPVAIHADQLTPTWRVYSTGSNVFQTRAGCL
IGAEHVNNSYECDIPIGAGICASYQTQTNSPRRARSVASQSIIAYTMSLGAENSVAYSNNSIAIP
TNFTISVTTEILPVSMTKTSVDCTMYICGDSTECSNLLLQYGSFCTQLNRALTGIAVEQDKNTQE
VFAQVKQIYKTPPIKDFGGFNFSQILPDPSKPSKRSFIEDLLFNKVTLADAGFIKQYGDCLGDIA
ARDLICAQKFNGLTVLPPLLTDEMIAQYTSALLACTITSGWTCGAGAALQIPFAMQMAYRFNGIG
VTQNVLYENQKLIANQFNSAIGKIQDSLSSTPSALGKLQDVVNQNAQALNTLVKQLSSNFGAISS
VLNDILSRLDKVEAEVQIDRLITGRLQSLQTYVTQQLIRAAEIRASANLAATKMSECVLGQSKRV
DFCGKGYHLMSFPQSAPHGVVFLHVTYVPAQEKNFTTAPAICHDGKAHFPREGVFVSNGTHWFVT
QRNFYEPQIITTDNTFVSGNCDVVIGIVNNTVYDPLQPELDSFKEELDKYFKNHTSPDVDLGDIS
GINASVVNIQKEIDRLNEVAKNLNESLIDLQELGKYEQYIKWPWYIWLGFIAGLIAIVMVTIMLC
CMTSCCSCLKGCCSCGSCCKFDEDDSEPVLKGVKLHYT
SEQ ID NO 317: SEQ ID NO 1 + A942P + D614N + T572I +
N532P + S884C + A893C
MFVFLVLLPLVSSQCVNLTTRTQLPPAYTNSFTRGVYYPDKVFRSSVLHSTQDLFLPFFSNVTWF
HAIHVSGTNGTKRFDNPVLPFNDGVYFASTEKSNIIRGWIFGTTLDSKTQSLLIVNNATNVVIKV
CEFQFCNDPFLGVYYHKNNKSWMESEFRVYSSANNCTFEYVSQPFLMDLEGKQGNFKNLREFVFK
NIDGYFKIYSKHTPINLVRDLPQGFSALEPLVDLPIGINITRFQTLLALHRSYLTPGDSSSGWTA
GAAAYYVGYLQPRTFLLKYNENGTITDAVDCALDPLSETKCTLKSFTVEKGIYQTSNFRVQPTES
IVRFPNITNLCPFGEVFNATRFASVYAWNRKRISNCVADYSVLYNSASFSTFKCYGVSPTKLNDL
CFTNVYADSFVIRGDEVRQIAPGQTGKIADYNYKLPDDFTGCVIAWNSNNLDSKVGGNYNYLYRL
FRKSNLKPFERDISTEIYQAGSTPCNGVEGFNCYFPLQSYGFQPTNGVGYQPYRVVVLSFELLHA
PATVCGPKKSTPLVKNKCVNFNFNGLTGTGVLTESNKKFLPFQQFGRDIADITDAVRDPQTLEIL
DITPCSFGGVSVITPGTNTSNQVAVLYQNVNCTEVPVAIHADQLTPTWRVYSTGSNVFQTRAGCL
IGAEHVNNSYECDIPIGAGICASYQTQTNSPRRARSVASQSIIAYTMSLGAENSVAYSNNSIAIP
TNFTISVTTEILPVSMTKTSVDCTMYICGDSTECSNLLLQYGSFCTQLNRALTGIAVEQDKNTQE
VFAQVKQIYKTPPIKDFGGFNFSQILPDPSKPSKRSFIEDLLFNKVTLADAGFIKQYGDCLGDIA
ARDLICAQKFNGLTVLPPLLTDEMIAQYTSALLAGTITCGWTFGAGACLQIPFAMQMAYRFNGIG
VTQNVLYENQKLIANQFNSAIGKIQDSLSSTPSALGKLQDVVNQNAQALNTLVKQLSSNFGAISS
VLNDILSRLDKVEAEVQIDRLITGRLQSLQTYVTQQLIRAAEIRASANLAATKMSECVLGQSKRV
DFCGKGYHLMSFPQSAPHGVVFLHVTYVPAQEKNFTTAPAICHDGKAHFPREGVFVSNGTHWFVT
QRNFYEPQIITTDNTFVSGNCDVVIGIVNNTVYDPLQPELDSFKEELDKYFKNHTSPDVDLGDIS
GINASVVNIQKEIDRLNEVAKNLNESLIDLQELGKYEQYIKWPWYIWLGFIAGLIAIVMVTIMLC
CMTSCCSCLKGCCSCGSCCKFDEDDSEPVLKGVKLHYT
SEQ ID NO 318: SEQ ID NO 1 + A892P + D614N + T572I +
N532P + G880C + F888C
MFVFLVLLPLVSSQCVNLTTRTQLPPAYTNSFTRGVYYPDKVFRSSVLHSTQDLFLPFFSNVTWF
HAIHVSGTNGTKRFDNPVLPFNDGVYFASTEKSNIIRGWIFGTTLDSKTQSLLIVNNATNVVIKV
CEFQFCNDPFLGVYYHKNNKSWMESEFRVYSSANNCTFEYVSQPFLMDLEGKQGNFKNLREFVFK
NIDGYFKIYSKHTPINLVRDLPQGFSALEPLVDLPIGINITRFQTLLALHRSYLTPGDSSSGWTA
GAAAYYVGYLQPRTFLLKYNENGTITDAVDCALDPLSETKCTLKSFTVEKGIYQTSNFRVQPTES
IVRFPNITNLCPFGEVFNATRFASVYAWNRKRISNCVADYSVLYNSASFSTFKCYGVSPTKLNDL
CFTNVYADSFVIRGDEVRQIAPGQTGKIADYNYKLPDDFTGCVIAWNSNNLDSKVGGNYNYLYRL
FRKSNLKPFERDISTEIYQAGSTPCNGVEGFNCYFPLQSYGFQPTNGVGYQPYRVVVLSFELLHA
PATVCGPKKSTPLVKNKCVNFNFNGLTGTGVLTESNKKFLPFQQFGRDIADITDAVRDPQTLEIL
DITPCSFGGVSVITPGTNTSNQVAVLYQNVNCTEVPVAIHADQLTPTWRVYSTGSNVFQTRAGCL
IGAEHVNNSYECDIPIGAGICASYQTQTNSPRRARSVASQSIIAYTMSLGAENSVAYSNNSIAIP
TNFTISVTTEILPVSMTKTSVDCTMYICGDSTECSNLLLQYGSFCTQLNRALTGIAVEQDKNTQE
VFAQVKQIYKTPPIKDFGGFNFSQILPDPSKPSKRSFIEDLLFNKVTLADAGFIKQYGDCLGDIA
ARDLICAQKFNGLTVLPPLLTDEMIAQYTSALLACTITSGWTCGAGPALQIPFAMQMAYRFNGIG
VTQNVLYENQKLIANQFNSAIGKIQDSLSSTASALGKLQDVVNQNAQALNTLVKQLSSNFGAISS
VLNDILSRLDKVEAEVQIDRLITGRLQSLQTYVTQQLIRAAEIRASANLAATKMSECVLGQSKRV
DFCGKGYHLMSFPQSAPHGVVFLHVTYVPAQEKNFTTAPAICHDGKAHFPREGVFVSNGTHWFVT
QRNFYEPQIITTDNTFVSGNCDVVIGIVNNTVYDPLQPELDSFKEELDKYFKNHTSPDVDLGDIS
GINASVVNIQKEIDRLNEVAKNLNESLIDLQELGKYEQYIKWPWYIWLGFIAGLIAIVMVTIMLC
CMTSCCSCLKGCCSCGSCCKFDEDDSEPVLKGVKLHYT
SEQ ID NO 319: SEQ ID NO 1 + A892P + D614N + T572I +
N532P + S884C + A893C
MFVFLVLLPLVSSQCVNLTTRTQLPPAYTNSFTRGVYYPDKVFRSSVLHSTQDLFLPFFSNVTWF
HAIHVSGTNGTKRFDNPVLPFNDGVYFASTEKSNIIRGWIFGTTLDSKTQSLLIVNNATNVVIKV
CEFQFCNDPFLGVYYHKNNKSWMESEFRVYSSANNCTFEYVSQPFLMDLEGKQGNFKNLREFVFK
NIDGYFKIYSKHTPINLVRDLPQGFSALEPLVDLPIGINITRFQTLLALHRSYLTPGDSSSGWTA
GAAAYYVGYLQPRTFLLKYNENGTITDAVDCALDPLSETKCTLKSFTVEKGIYQTSNFRVQPTES
IVRFPNITNLCPFGEVFNATRFASVYAWNRKRISNCVADYSVLYNSASFSTFKCYGVSPTKLNDL
CFTNVYADSFVIRGDEVRQIAPGQTGKIADYNYKLPDDFTGCVIAWNSNNLDSKVGGNYNYLYRL
FRKSNLKPFERDISTEIYQAGSTPCNGVEGFNCYFPLQSYGFQPTNGVGYQPYRVVVLSFELLHA
PATVCGPKKSTPLVKNKCVNFNFNGLTGTGVLTESNKKFLPFQQFGRDIADITDAVRDPQTLEIL
DITPCSFGGVSVITPGTNTSNQVAVLYQNVNCTEVPVAIHADQLTPTWRVYSTGSNVFQTRAGCL
IGAEHVNNSYECDIPIGAGICASYQTQTNSPRRARSVASQSIIAYTMSLGAENSVAYSNNSIAIP
TNFTISVTTEILPVSMTKTSVDCTMYICGDSTECSNLLLQYGSFCTQLNRALTGIAVEQDKNTQE
VFAQVKQIYKTPPIKDFGGFNFSQILPDPSKPSKRSFIEDLLFNKVTLADAGFIKQYGDCLGDIA
ARDLICAQKFNGLTVLPPLLTDEMIAQYTSALLAGTITCGWTFGAGPCLQIPFAMQMAYRFNGIG
VTQNVLYENQKLIANQFNSAIGKIQDSLSSTASALGKLQDVVNQNAQALNTLVKQLSSNFGAISS
VLNDILSRLDKVEAEVQIDRLITGRLQSLQTYVTQQLIRAAEIRASANLAATKMSECVLGQSKRV
DFCGKGYHLMSFPQSAPHGVVFLHVTYVPAQEKNFTTAPAICHDGKAHFPREGVFVSNGTHWFVT
QRNFYEPQIITTDNTFVSGNCDVVIGIVNNTVYDPLQPELDSFKEELDKYFKNHTSPDVDLGDIS
GINASVVNIQKEIDRLNEVAKNLNESLIDLQELGKYEQYIKWPWYIWLGFIAGLIAIVMVTIMLC
CMTSCCSCLKGCCSCGSCCKFDEDDSEPVLKGVKLHYT
SEQ ID NO 320: SEQ ID NO 1 + A942P + A892P + D614N + T572I +
N532P + G880C + F888C
MFVFLVLLPLVSSQCVNLTTRTQLPPAYTNSFTRGVYYPDKVFRSSVLHSTQDLFLPFFSNVTWF
HAIHVSGTNGTKRFDNPVLPFNDGVYFASTEKSNIIRGWIFGTTLDSKTQSLLIVNNATNVVIKV
CEFQFCNDPFLGVYYHKNNKSWMESEFRVYSSANNCTFEYVSQPFLMDLEGKQGNFKNLREFVFK
NIDGYFKIYSKHTPINLVRDLPQGFSALEPLVDLPIGINITRFQTLLALHRSYLTPGDSSSGWTA
GAAAYYVGYLQPRTFLLKYNENGTITDAVDCALDPLSETKCTLKSFTVEKGIYQTSNFRVQPTES
IVRFPNITNLCPFGEVFNATRFASVYAWNRKRISNCVADYSVLYNSASFSTFKCYGVSPTKLNDL
CFTNVYADSFVIRGDEVRQIAPGQTGKIADYNYKLPDDFTGCVIAWNSNNLDSKVGGNYNYLYRL
FRKSNLKPFERDISTEIYQAGSTPCNGVEGFNCYFPLQSYGFQPTNGVGYQPYRVVVLSFELLHA
PATVCGPKKSTPLVKNKCVNFNFNGLTGTGVLTESNKKFLPFQQFGRDIADITDAVRDPQTLEIL
DITPCSFGGVSVITPGTNTSNQVAVLYQNVNCTEVPVAIHADQLTPTWRVYSTGSNVFQTRAGCL
IGAEHVNNSYECDIPIGAGICASYQTQTNSPRRARSVASQSIIAYTMSLGAENSVAYSNNSIAIP
TNFTISVTTEILPVSMTKTSVDCTMYICGDSTECSNLLLQYGSFCTQLNRALTGIAVEQDKNTQE
VFAQVKQIYKTPPIKDFGGFNFSQILPDPSKPSKRSFIEDLLFNKVTLADAGFIKQYGDCLGDIA
ARDLICAQKFNGLTVLPPLLTDEMIAQYTSALLACTITSGWTCGAGPALQIPFAMQMAYRFNGIG
VTQNVLYENQKLIANQFNSAIGKIQDSLSSTPSALGKLQDVVNQNAQALNTLVKQLSSNFGAISS
VLNDILSRLDKVEAEVQIDRLITGRLQSLQTYVTQQLIRAAEIRASANLAATKMSECVLGQSKRV
DFCGKGYHLMSFPQSAPHGVVFLHVTYVPAQEKNFTTAPAICHDGKAHFPREGVFVSNGTHWFVT
QRNFYEPQIITTDNTFVSGNCDVVIGIVNNTVYDPLQPELDSFKEELDKYFKNHTSPDVDLGDIS
GINASVVNIQKEIDRLNEVAKNLNESLIDLQELGKYEQYIKWPWYIWLGFIAGLIAIVMVTIMLC
CMTSCCSCLKGCCSCGSCCKFDEDDSEPVLKGVKLHYT
SEQ ID NO 321: SEQ ID NO 1 + A942P + A892P + D614N + T572I +
N532P + S884C + A893C
MFVFLVLLPLVSSQCVNLTTRTQLPPAYTNSFTRGVYYPDKVFRSSVLHSTQDLFLPFFSNVTWF
HAIHVSGTNGTKRFDNPVLPFNDGVYFASTEKSNIIRGWIFGTTLDSKTQSLLIVNNATNVVIKV
CEFQFCNDPFLGVYYHKNNKSWMESEFRVYSSANNCTFEYVSQPFLMDLEGKQGNFKNLREFVFK
NIDGYFKIYSKHTPINLVRDLPQGFSALEPLVDLPIGINITRFQTLLALHRSYLTPGDSSSGWTA
GAAAYYVGYLQPRTFLLKYNENGTITDAVDCALDPLSETKCTLKSFTVEKGIYQTSNFRVQPTES
IVRFPNITNLCPFGEVFNATRFASVYAWNRKRISNCVADYSVLYNSASFSTFKCYGVSPTKLNDL
CFTNVYADSFVIRGDEVRQIAPGQTGKIADYNYKLPDDFTGCVIAWNSNNLDSKVGGNYNYLYRL
FRKSNLKPFERDISTEIYQAGSTPCNGVEGFNCYFPLQSYGFQPTNGVGYQPYRVVVLSFELLHA
PATVCGPKKSTPLVKNKCVNFNFNGLTGTGVLTESNKKFLPFQQFGRDIADITDAVRDPQTLEIL
DITPCSFGGVSVITPGTNTSNQVAVLYQNVNCTEVPVAIHADQLTPTWRVYSTGSNVFQTRAGCL
IGAEHVNNSYECDIPIGAGICASYQTQTNSPRRARSVASQSIIAYTMSLGAENSVAYSNNSIAIP
TNFTISVTTEILPVSMTKTSVDCTMYICGDSTECSNLLLQYGSFCTQLNRALTGIAVEQDKNTQE
VFAQVKQIYKTPPIKDFGGFNFSQILPDPSKPSKRSFIEDLLFNKVTLADAGFIKQYGDCLGDIA
ARDLICAQKFNGLTVLPPLLTDEMIAQYTSALLAGTITCGWTFGAGPCLQIPFAMQMAYRFNGIG
VTQNVLYENQKLIANQFNSAIGKIQDSLSSTPSALGKLQDVVNQNAQALNTLVKQLSSNFGAISS
VLNDILSRLDKVEAEVQIDRLITGRLQSLQTYVTQQLIRAAEIRASANLAATKMSECVLGQSKRV
DFCGKGYHLMSFPQSAPHGVVFLHVTYVPAQEKNFTTAPAICHDGKAHFPREGVFVSNGTHWFVT
QRNFYEPQIITTDNTFVSGNCDVVIGIVNNTVYDPLQPELDSFKEELDKYFKNHTSPDVDLGDIS
GINASVVNIQKEIDRLNEVAKNLNESLIDLQELGKYEQYIKWPWYIWLGFIAGLIAIVMVTIMLC
CMTSCCSCLKGCCSCGSCCKFDEDDSEPVLKGVKLHYT
SEQ ID NO 322: SEQ ID NO 195 + A942P
MFVFLVLLPLVSSQCVNLTTRTQLPPAYTNSFTRGVYYPDKVFRSSVLHSTQDLFLPFFSNVTWF
HAIHVSGTNGTKRFDNPVLPFNDGVYFASTEKSNIIRGWIFGTTLDSKTQSLLIVNNATNVVIKV
CEFQFCNDPFLGVYYHKNNKSWMESEFRVYSSANNCTFEYVSQPFLMDLEGKQGNFKNLREFVFK
NIDGYFKIYSKHTPINLVRDLPQGFSALEPLVDLPIGINITRFQTLLALHRSYLTPGDSSSGWTA
GAAAYYVGYLQPRTFLLKYNENGTITDAVDCALDPLSETKCTLKSFTVEKGIYQTSNFRVQPTES
IVRFPNITNLCPFGEVFNATRFASVYAWNRKRISNCVADYSVLYNSASFSTFKCYGVSPTKLNDL
CFTNVYADSFVIRGDEVRQIAPGQTGKIADYNYKLPDDFTGCVIAWNSNNLDSKVGGNYNYLYRL
FRKSNLKPFERDISTEIYQAGSTPCNGVEGFNCYFPLQSYGFQPTNGVGYQPYRVVVLSFELLHA
PATVCGPKKSTNLVKNKCVNFNFNGLTGTGVLTESNKKFLPFQQFGRDIADTTDAVRDPQTLEIL
DITPCSFGGVSVITPGTNTSNQVAVLYQDVNCTEVPVAIHADQLTPTWRVYSTGSNVFQTRAGCL
IGAEHVNNSYECDIPIGAGICASYQTQTNSPRRARSVASQSIIAYTMSLGAENSVAYSNNSIAIP
TNFTISVTTEILPVSMTKTSVDCTMYICGDSTECSNLLLQYGSFCTQLNRALTGIAVEQDKNTQE
VFAQVKQIYKTPPIKDFGGFNFSQILPDPSKPSKRSFIEDLLFNKVTLADAGFIKQYGDCLGDIA
ARDLICAQKFNGLTVLPPLLTDEMIAQYTSALLAGTITSGWTFGAGAALQIPFAMQMAYRFNGIG
VTQNVLYENQKLIANQFNSAIGKIQDSLSSTPSALGKLQDVVNQNAQALNTLVKQLSSNFGAISS
VLNDILSRLDPPEAEVQIDRLITGRLQSLQTYVTQQLIRAAEIRASANLAATKMSECVLGQSKRV
DFCGKGYHLMSFPQSAPHGVVFLHVTYVPAQEKNFTTAPAICHDGKAHFPREGVFVSNGTHWFVT
QRNFYEPQIITTDNTFVSGNCDVVIGIVNNTVYDPLQPELDSFKEELDKYFKNHTSPDVDLGDIS
GINASVVNIQKEIDRLNEVAKNLNESLIDLQELGKYEQYIKWPWYIWLGFIAGLIAIVMVTIMLC
CMTSCCSCLKGCCSCGSCCKFDEDDSEPVLKGVKLHYT
SEQ ID NO 323: SEQ ID NO 195 + A892P
MFVFLVLLPLVSSQCVNLTTRTQLPPAYTNSFTRGVYYPDKVFRSSVLHSTQDLFLPFFSNVTWF
HAIHVSGTNGTKRFDNPVLPFNDGVYFASTEKSNIIRGWIFGTTLDSKTQSLLIVNNATNVVIKV
CEFQFCNDPFLGVYYHKNNKSWMESEFRVYSSANNCTFEYVSQPFLMDLEGKQGNFKNLREFVFK
NIDGYFKIYSKHTPINLVRDLPQGFSALEPLVDLPIGINITRFQTLLALHRSYLTPGDSSSGWTA
GAAAYYVGYLQPRTFLLKYNENGTITDAVDCALDPLSETKCTLKSFTVEKGIYQTSNFRVQPTES
IVRFPNITNLCPFGEVFNATRFASVYAWNRKRISNCVADYSVLYNSASFSTFKCYGVSPTKLNDL
CFTNVYADSFVIRGDEVRQIAPGQTGKIADYNYKLPDDFTGCVIAWNSNNLDSKVGGNYNYLYRL
FRKSNLKPFERDISTEIYQAGSTPCNGVEGFNCYFPLQSYGFQPTNGVGYQPYRVVVLSFELLHA
PATVCGPKKSTNLVKNKCVNFNFNGLTGTGVLTESNKKFLPFQQFGRDIADTTDAVRDPQTLEIL
DITPCSFGGVSVITPGTNTSNQVAVLYQDVNCTEVPVAIHADQLTPTWRVYSTGSNVFQTRAGCL
IGAEHVNNSYECDIPIGAGICASYQTQTNSPRRARSVASQSIIAYTMSLGAENSVAYSNNSIAIP
TNFTISVTTEILPVSMTKTSVDCTMYICGDSTECSNLLLQYGSFCTQLNRALTGIAVEQDKNTQE
VFAQVKQIYKTPPIKDFGGFNFSQILPDPSKPSKRSFIEDLLFNKVTLADAGFIKQYGDCLGDIA
ARDLICAQKFNGLTVLPPLLTDEMIAQYTSALLAGTITSGWTFGAGPALQIPFAMQMAYRFNGIG
VTQNVLYENQKLIANQFNSAIGKIQDSLSSTASALGKLQDVVNQNAQALNTLVKQLSSNFGAISS
VLNDILSRLDPPEAEVQIDRLITGRLQSLQTYVTQQLIRAAEIRASANLAATKMSECVLGQSKRV
DFCGKGYHLMSFPQSAPHGVVFLHVTYVPAQEKNFTTAPAICHDGKAHFPREGVFVSNGTHWFVT
QRNFYEPQIITTDNTFVSGNCDVVIGIVNNTVYDPLQPELDSFKEELDKYFKNHTSPDVDLGDIS
GINASVVNIQKEIDRLNEVAKNLNESLIDLQELGKYEQYIKWPWYIWLGFIAGLIAIVMVTIMLC
CMTSCCSCLKGCCSCGSCCKFDEDDSEPVLKGVKLHYT
SEQ ID NO 324: SEQ ID NO 195 + D614N
MFVFLVLLPLVSSQCVNLTTRTQLPPAYTNSFTRGVYYPDKVFRSSVLHSTQDLFLPFFSNVTWF
HAIHVSGTNGTKRFDNPVLPFNDGVYFASTEKSNIIRGWIFGTTLDSKTQSLLIVNNATNVVIKV
CEFQFCNDPFLGVYYHKNNKSWMESEFRVYSSANNCTFEYVSQPFLMDLEGKQGNFKNLREFVFK
NIDGYFKIYSKHTPINLVRDLPQGFSALEPLVDLPIGINITRFQTLLALHRSYLTPGDSSSGWTA
GAAAYYVGYLQPRTFLLKYNENGTITDAVDCALDPLSETKCTLKSFTVEKGIYQTSNFRVQPTES
IVRFPNITNLCPFGEVFNATRFASVYAWNRKRISNCVADYSVLYNSASFSTFKCYGVSPTKLNDL
CFTNVYADSFVIRGDEVRQIAPGQTGKIADYNYKLPDDFTGCVIAWNSNNLDSKVGGNYNYLYRL
FRKSNLKPFERDISTEIYQAGSTPCNGVEGFNCYFPLQSYGFQPTNGVGYQPYRVVVLSFELLHA
PATVCGPKKSTNLVKNKCVNFNFNGLTGTGVLTESNKKFLPFQQFGRDIADTTDAVRDPQTLEIL
DITPCSFGGVSVITPGTNTSNQVAVLYQNVNCTEVPVAIHADQLTPTWRVYSTGSNVFQTRAGCL
IGAEHVNNSYECDIPIGAGICASYQTQTNSPRRARSVASQSIIAYTMSLGAENSVAYSNNSIAIP
TNFTISVTTEILPVSMTKTSVDCTMYICGDSTECSNLLLQYGSFCTQLNRALTGIAVEQDKNTQE
VFAQVKQIYKTPPIKDFGGFNFSQILPDPSKPSKRSFIEDLLFNKVTLADAGFIKQYGDCLGDIA
ARDLICAQKFNGLTVLPPLLTDEMIAQYTSALLAGTITSGWTFGAGAALQIPFAMQMAYRFNGIG
VTQNVLYENQKLIANQFNSAIGKIQDSLSSTASALGKLQDVVNQNAQALNTLVKQLSSNFGAISS
VLNDILSRLDPPEAEVQIDRLITGRLQSLQTYVTQQLIRAAEIRASANLAATKMSECVLGQSKRV
DFCGKGYHLMSFPQSAPHGVVFLHVTYVPAQEKNFTTAPAICHDGKAHFPREGVFVSNGTHWFVT
QRNFYEPQIITTDNTFVSGNCDVVIGIVNNTVYDPLQPELDSFKEELDKYFKNHTSPDVDLGDIS
GINASVVNIQKEIDRLNEVAKNLNESLIDLQELGKYEQYIKWPWYIWLGFIAGLIAIVMVTIMLC
CMTSCCSCLKGCCSCGSCCKFDEDDSEPVLKGVKLHYT
SEQ ID NO 325: SEQ ID NO 195 + T572I
MFVFLVLLPLVSSQCVNLTTRTQLPPAYTNSFTRGVYYPDKVFRSSVLHSTQDLFLPFFSNVTWF
HAIHVSGTNGTKRFDNPVLPFNDGVYFASTEKSNIIRGWIFGTTLDSKTQSLLIVNNATNVVIKV
CEFQFCNDPFLGVYYHKNNKSWMESEFRVYSSANNCTFEYVSQPFLMDLEGKQGNFKNLREFVFK
NIDGYFKIYSKHTPINLVRDLPQGFSALEPLVDLPIGINITRFQTLLALHRSYLTPGDSSSGWTA
GAAAYYVGYLQPRTFLLKYNENGTITDAVDCALDPLSETKCTLKSFTVEKGIYQTSNFRVQPTES
IVRFPNITNLCPFGEVFNATRFASVYAWNRKRISNCVADYSVLYNSASFSTFKCYGVSPTKLNDL
CFTNVYADSFVIRGDEVRQIAPGQTGKIADYNYKLPDDFTGCVIAWNSNNLDSKVGGNYNYLYRL
FRKSNLKPFERDISTEIYQAGSTPCNGVEGFNCYFPLQSYGFQPTNGVGYQPYRVVVLSFELLHA
PATVCGPKKSTNLVKNKCVNFNFNGLTGTGVLTESNKKFLPFQQFGRDIADITDAVRDPQTLEIL
DITPCSFGGVSVITPGTNTSNQVAVLYQDVNCTEVPVAIHADQLTPTWRVYSTGSNVFQTRAGCL
IGAEHVNNSYECDIPIGAGICASYQTQTNSPRRARSVASQSIIAYTMSLGAENSVAYSNNSIAIP
TNFTISVTTEILPVSMTKTSVDCTMYICGDSTECSNLLLQYGSFCTQLNRALTGIAVEQDKNTQE
VFAQVKQIYKTPPIKDFGGFNFSQILPDPSKPSKRSFIEDLLFNKVTLADAGFIKQYGDCLGDIA
ARDLICAQKFNGLTVLPPLLTDEMIAQYTSALLAGTITSGWTFGAGAALQIPFAMQMAYRFNGIG
VTQNVLYENQKLIANQFNSAIGKIQDSLSSTASALGKLQDVVNQNAQALNTLVKQLSSNFGAISS
VLNDILSRLDPPEAEVQIDRLITGRLQSLQTYVTQQLIRAAEIRASANLAATKMSECVLGQSKRV
DFCGKGYHLMSFPQSAPHGVVFLHVTYVPAQEKNFTTAPAICHDGKAHFPREGVFVSNGTHWFVT
QRNFYEPQIITTDNTFVSGNCDVVIGIVNNTVYDPLQPELDSFKEELDKYFKNHTSPDVDLGDIS
GINASVVNIQKEIDRLNEVAKNLNESLIDLQELGKYEQYIKWPWYIWLGFIAGLIAIVMVTIMLC
CMTSCCSCLKGCCSCGSCCKFDEDDSEPVLKGVKLHYT
SEQ ID NO 326: SEQ ID NO 195 + N532P
MFVFLVLLPLVSSQCVNLTTRTQLPPAYTNSFTRGVYYPDKVFRSSVLHSTQDLFLPFFSNVTWF
HAIHVSGTNGTKRFDNPVLPFNDGVYFASTEKSNIIRGWIFGTTLDSKTQSLLIVNNATNVVIKV
CEFQFCNDPFLGVYYHKNNKSWMESEFRVYSSANNCTFEYVSQPFLMDLEGKQGNFKNLREFVFK
NIDGYFKIYSKHTPINLVRDLPQGFSALEPLVDLPIGINITRFQTLLALHRSYLTPGDSSSGWTA
GAAAYYVGYLQPRTFLLKYNENGTITDAVDCALDPLSETKCTLKSFTVEKGIYQTSNFRVQPTES
IVRFPNITNLCPFGEVFNATRFASVYAWNRKRISNCVADYSVLYNSASFSTFKCYGVSPTKLNDL
CFTNVYADSFVIRGDEVRQIAPGQTGKIADYNYKLPDDFTGCVIAWNSNNLDSKVGGNYNYLYRL
FRKSNLKPFERDISTEIYQAGSTPCNGVEGFNCYFPLQSYGFQPTNGVGYQPYRVVVLSFELLHA
PATVCGPKKSTPLVKNKCVNFNFNGLTGTGVLTESNKKFLPFQQFGRDIADTTDAVRDPQTLEIL
DITPCSFGGVSVITPGTNTSNQVAVLYQDVNCTEVPVAIHADQLTPTWRVYSTGSNVFQTRAGCL
IGAEHVNNSYECDIPIGAGICASYQTQTNSPRRARSVASQSIIAYTMSLGAENSVAYSNNSIAIP
TNFTISVTTEILPVSMTKTSVDCTMYICGDSTECSNLLLQYGSFCTQLNRALTGIAVEQDKNTQE
VFAQVKQIYKTPPIKDFGGFNFSQILPDPSKPSKRSFIEDLLFNKVTLADAGFIKQYGDCLGDIA
ARDLICAQKFNGLTVLPPLLTDEMIAQYTSALLAGTITSGWTFGAGAALQIPFAMQMAYRFNGIG
VTQNVLYENQKLIANQFNSAIGKIQDSLSSTASALGKLQDVVNQNAQALNTLVKQLSSNFGAISS
VLNDILSRLDPPEAEVQIDRLITGRLQSLQTYVTQQLIRAAEIRASANLAATKMSECVLGQSKRV
DFCGKGYHLMSFPQSAPHGVVFLHVTYVPAQEKNFTTAPAICHDGKAHFPREGVFVSNGTHWFVT
QRNFYEPQIITTDNTFVSGNCDVVIGIVNNTVYDPLQPELDSFKEELDKYFKNHTSPDVDLGDIS
GINASVVNIQKEIDRLNEVAKNLNESLIDLQELGKYEQYIKWPWYIWLGFIAGLIAIVMVTIMLC
CMTSCCSCLKGCCSCGSCCKFDEDDSEPVLKGVKLHYT
SEQ ID NO 327: SEQ ID NO 195 + G880C + F888C
MFVFLVLLPLVSSQCVNLTTRTQLPPAYTNSFTRGVYYPDKVFRSSVLHSTQDLFLPFFSNVTWF
HAIHVSGTNGTKRFDNPVLPFNDGVYFASTEKSNIIRGWIFGTTLDSKTQSLLIVNNATNVVIKV
CEFQFCNDPFLGVYYHKNNKSWMESEFRVYSSANNCTFEYVSQPFLMDLEGKQGNFKNLREFVFK
NIDGYFKIYSKHTPINLVRDLPQGFSALEPLVDLPIGINITRFQTLLALHRSYLTPGDSSSGWTA
GAAAYYVGYLQPRTFLLKYNENGTITDAVDCALDPLSETKCTLKSFTVEKGIYQTSNFRVQPTES
IVRFPNITNLCPFGEVFNATRFASVYAWNRKRISNCVADYSVLYNSASFSTFKCYGVSPTKLNDL
CFTNVYADSFVIRGDEVRQIAPGQTGKIADYNYKLPDDFTGCVIAWNSNNLDSKVGGNYNYLYRL
FRKSNLKPFERDISTEIYQAGSTPCNGVEGFNCYFPLQSYGFQPTNGVGYQPYRVVVLSFELLHA
PATVCGPKKSTNLVKNKCVNFNFNGLTGTGVLTESNKKFLPFQQFGRDIADTTDAVRDPQTLEIL
DITPCSFGGVSVITPGTNTSNQVAVLYQDVNCTEVPVAIHADQLTPTWRVYSTGSNVFQTRAGCL
IGAEHVNNSYECDIPIGAGICASYQTQTNSPRRARSVASQSIIAYTMSLGAENSVAYSNNSIAIP
TNFTISVTTEILPVSMTKTSVDCTMYICGDSTECSNLLLQYGSFCTQLNRALTGIAVEQDKNTQE
VFAQVKQIYKTPPIKDFGGFNFSQILPDPSKPSKRSFIEDLLFNKVTLADAGFIKQYGDCLGDIA
ARDLICAQKFNGLTVLPPLLTDEMIAQYTSALLACTITSGWTCGAGAALQIPFAMQMAYRFNGIG
VTQNVLYENQKLIANQFNSAIGKIQDSLSSTASALGKLQDVVNQNAQALNTLVKQLSSNFGAISS
VLNDILSRLDPPEAEVQIDRLITGRLQSLQTYVTQQLIRAAEIRASANLAATKMSECVLGQSKRV
DFCGKGYHLMSFPQSAPHGVVFLHVTYVPAQEKNFTTAPAICHDGKAHFPREGVFVSNGTHWFVT
QRNFYEPQIITTDNTFVSGNCDVVIGIVNNTVYDPLQPELDSFKEELDKYFKNHTSPDVDLGDIS
GINASVVNIQKEIDRLNEVAKNLNESLIDLQELGKYEQYIKWPWYIWLGFIAGLIAIVMVTIMLC
CMTSCCSCLKGCCSCGSCCKFDEDDSEPVLKGVKLHYT
SEQ ID NO 328: SEQ ID NO 195 + S884C + A893C
MFVFLVLLPLVSSQCVNLTTRTQLPPAYTNSFTRGVYYPDKVFRSSVLHSTQDLFLPFFSNVTWF
HAIHVSGTNGTKRFDNPVLPFNDGVYFASTEKSNIIRGWIFGTTLDSKTQSLLIVNNATNVVIKV
CEFQFCNDPFLGVYYHKNNKSWMESEFRVYSSANNCTFEYVSQPFLMDLEGKQGNFKNLREFVFK
NIDGYFKIYSKHTPINLVRDLPQGFSALEPLVDLPIGINITRFQTLLALHRSYLTPGDSSSGWTA
GAAAYYVGYLQPRTFLLKYNENGTITDAVDCALDPLSETKCTLKSFTVEKGIYQTSNFRVQPTES
IVRFPNITNLCPFGEVFNATRFASVYAWNRKRISNCVADYSVLYNSASFSTFKCYGVSPTKLNDL
CFTNVYADSFVIRGDEVRQIAPGQTGKIADYNYKLPDDFTGCVIAWNSNNLDSKVGGNYNYLYRL
FRKSNLKPFERDISTEIYQAGSTPCNGVEGFNCYFPLQSYGFQPTNGVGYQPYRVVVLSFELLHA
PATVCGPKKSTNLVKNKCVNFNFNGLTGTGVLTESNKKFLPFQQFGRDIADTTDAVRDPQTLEIL
DITPCSFGGVSVITPGTNTSNQVAVLYQDVNCTEVPVAIHADQLTPTWRVYSTGSNVFQTRAGCL
IGAEHVNNSYECDIPIGAGICASYQTQTNSPRRARSVASQSIIAYTMSLGAENSVAYSNNSIAIP
TNFTISVTTEILPVSMTKTSVDCTMYICGDSTECSNLLLQYGSFCTQLNRALTGIAVEQDKNTQE
VFAQVKQIYKTPPIKDFGGFNFSQILPDPSKPSKRSFIEDLLFNKVTLADAGFIKQYGDCLGDIA
ARDLICAQKFNGLTVLPPLLTDEMIAQYTSALLAGTITCGWTFGAGACLQIPFAMQMAYRFNGIG
VTQNVLYENQKLIANQFNSAIGKIQDSLSSTASALGKLQDVVNQNAQALNTLVKQLSSNFGAISS
VLNDILSRLDPPEAEVQIDRLITGRLQSLQTYVTQQLIRAAEIRASANLAATKMSECVLGQSKRV
DFCGKGYHLMSFPQSAPHGVVFLHVTYVPAQEKNFTTAPAICHDGKAHFPREGVFVSNGTHWFVT
QRNFYEPQIITTDNTFVSGNCDVVIGIVNNTVYDPLQPELDSFKEELDKYFKNHTSPDVDLGDIS
GINASVVNIQKEIDRLNEVAKNLNESLIDLQELGKYEQYIKWPWYIWLGFIAGLIAIVMVTIMLC
CMTSCCSCLKGCCSCGSCCKFDEDDSEPVLKGVKLHYT
SEQ ID NO 329: SEQ ID NO 195 + A942P + A892P
MFVFLVLLPLVSSQCVNLTTRTQLPPAYTNSFTRGVYYPDKVFRSSVLHSTQDLFLPFFSNVTWF
HAIHVSGTNGTKRFDNPVLPFNDGVYFASTEKSNIIRGWIFGTTLDSKTQSLLIVNNATNVVIKV
CEFQFCNDPFLGVYYHKNNKSWMESEFRVYSSANNCTFEYVSQPFLMDLEGKQGNFKNLREFVFK
NIDGYFKIYSKHTPINLVRDLPQGFSALEPLVDLPIGINITRFQTLLALHRSYLTPGDSSSGWTA
GAAAYYVGYLQPRTFLLKYNENGTITDAVDCALDPLSETKCTLKSFTVEKGIYQTSNFRVQPTES
IVRFPNITNLCPFGEVFNATRFASVYAWNRKRISNCVADYSVLYNSASFSTFKCYGVSPTKLNDL
CFTNVYADSFVIRGDEVRQIAPGQTGKIADYNYKLPDDFTGCVIAWNSNNLDSKVGGNYNYLYRL
FRKSNLKPFERDISTEIYQAGSTPCNGVEGFNCYFPLQSYGFQPTNGVGYQPYRVVVLSFELLHA
PATVCGPKKSTNLVKNKCVNFNFNGLTGTGVLTESNKKFLPFQQFGRDIADTTDAVRDPQTLEIL
DITPCSFGGVSVITPGTNTSNQVAVLYQDVNCTEVPVAIHADQLTPTWRVYSTGSNVFQTRAGCL
IGAEHVNNSYECDIPIGAGICASYQTQTNSPRRARSVASQSIIAYTMSLGAENSVAYSNNSIAIP
TNFTISVTTEILPVSMTKTSVDCTMYICGDSTECSNLLLQYGSFCTQLNRALTGIAVEQDKNTQE
VFAQVKQIYKTPPIKDFGGFNFSQILPDPSKPSKRSFIEDLLFNKVTLADAGFIKQYGDCLGDIA
ARDLICAQKFNGLTVLPPLLTDEMIAQYTSALLAGTITSGWTFGAGPALQIPFAMQMAYRFNGIG
VTQNVLYENQKLIANQFNSAIGKIQDSLSSTPSALGKLQDVVNQNAQALNTLVKQLSSNFGAISS
VLNDILSRLDPPEAEVQIDRLITGRLQSLQTYVTQQLIRAAEIRASANLAATKMSECVLGQSKRV
DFCGKGYHLMSFPQSAPHGVVFLHVTYVPAQEKNFTTAPAICHDGKAHFPREGVFVSNGTHWFVT
QRNFYEPQIITTDNTFVSGNCDVVIGIVNNTVYDPLQPELDSFKEELDKYFKNHTSPDVDLGDIS
GINASVVNIQKEIDRLNEVAKNLNESLIDLQELGKYEQYIKWPWYIWLGFIAGLIAIVMVTIMLC
CMTSCCSCLKGCCSCGSCCKFDEDDSEPVLKGVKLHYT
SEQ ID NO 330: SEQ ID NO 195 + A942P + D614N
MFVFLVLLPLVSSQCVNLTTRTQLPPAYTNSFTRGVYYPDKVFRSSVLHSTQDLFLPFFSNVTWF
HAIHVSGTNGTKRFDNPVLPFNDGVYFASTEKSNIIRGWIFGTTLDSKTQSLLIVNNATNVVIKV
CEFQFCNDPFLGVYYHKNNKSWMESEFRVYSSANNCTFEYVSQPFLMDLEGKQGNFKNLREFVFK
NIDGYFKIYSKHTPINLVRDLPQGFSALEPLVDLPIGINITRFQTLLALHRSYLTPGDSSSGWTA
GAAAYYVGYLQPRTFLLKYNENGTITDAVDCALDPLSETKCTLKSFTVEKGIYQTSNFRVQPTES
IVRFPNITNLCPFGEVFNATRFASVYAWNRKRISNCVADYSVLYNSASFSTFKCYGVSPTKLNDL
CFTNVYADSFVIRGDEVRQIAPGQTGKIADYNYKLPDDFTGCVIAWNSNNLDSKVGGNYNYLYRL
FRKSNLKPFERDISTEIYQAGSTPCNGVEGFNCYFPLQSYGFQPTNGVGYQPYRVVVLSFELLHA
PATVCGPKKSTNLVKNKCVNFNFNGLTGTGVLTESNKKFLPFQQFGRDIADTTDAVRDPQTLEIL
DITPCSFGGVSVITPGTNTSNQVAVLYQNVNCTEVPVAIHADQLTPTWRVYSTGSNVFQTRAGCL
IGAEHVNNSYECDIPIGAGICASYQTQTNSPRRARSVASQSIIAYTMSLGAENSVAYSNNSIAIP
TNFTISVTTEILPVSMTKTSVDCTMYICGDSTECSNLLLQYGSFCTQLNRALTGIAVEQDKNTQE
VFAQVKQIYKTPPIKDFGGFNFSQILPDPSKPSKRSFIEDLLFNKVTLADAGFIKQYGDCLGDIA
ARDLICAQKFNGLTVLPPLLTDEMIAQYTSALLAGTITSGWTFGAGAALQIPFAMQMAYRFNGIG
VTQNVLYENQKLIANQFNSAIGKIQDSLSSTPSALGKLQDVVNQNAQALNTLVKQLSSNFGAISS
VLNDILSRLDPPEAEVQIDRLITGRLQSLQTYVTQQLIRAAEIRASANLAATKMSECVLGQSKRV
DFCGKGYHLMSFPQSAPHGVVFLHVTYVPAQEKNFTTAPAICHDGKAHFPREGVFVSNGTHWFVT
QRNFYEPQIITTDNTFVSGNCDVVIGIVNNTVYDPLQPELDSFKEELDKYFKNHTSPDVDLGDIS
GINASVVNIQKEIDRLNEVAKNLNESLIDLQELGKYEQYIKWPWYIWLGFIAGLIAIVMVTIMLC
CMTSCCSCLKGCCSCGSCCKFDEDDSEPVLKGVKLHYT
SEQ ID NO 331: SEQ ID NO 195 + A942P + T572I
MFVFLVLLPLVSSQCVNLTTRTQLPPAYTNSFTRGVYYPDKVFRSSVLHSTQDLFLPFFSNVTWF
HAIHVSGTNGTKRFDNPVLPFNDGVYFASTEKSNIIRGWIFGTTLDSKTQSLLIVNNATNVVIKV
CEFQFCNDPFLGVYYHKNNKSWMESEFRVYSSANNCTFEYVSQPFLMDLEGKQGNFKNLREFVFK
NIDGYFKIYSKHTPINLVRDLPQGFSALEPLVDLPIGINITRFQTLLALHRSYLTPGDSSSGWTA
GAAAYYVGYLQPRTFLLKYNENGTITDAVDCALDPLSETKCTLKSFTVEKGIYQTSNFRVQPTES
IVRFPNITNLCPFGEVFNATRFASVYAWNRKRISNCVADYSVLYNSASFSTFKCYGVSPTKLNDL
CFTNVYADSFVIRGDEVRQIAPGQTGKIADYNYKLPDDFTGCVIAWNSNNLDSKVGGNYNYLYRL
FRKSNLKPFERDISTEIYQAGSTPCNGVEGFNCYFPLQSYGFQPTNGVGYQPYRVVVLSFELLHA
PATVCGPKKSTNLVKNKCVNFNFNGLTGTGVLTESNKKFLPFQQFGRDIADITDAVRDPQTLEIL
DITPCSFGGVSVITPGTNTSNQVAVLYQDVNCTEVPVAIHADQLTPTWRVYSTGSNVFQTRAGCL
IGAEHVNNSYECDIPIGAGICASYQTQTNSPRRARSVASQSIIAYTMSLGAENSVAYSNNSIAIP
TNFTISVTTEILPVSMTKTSVDCTMYICGDSTECSNLLLQYGSFCTQLNRALTGIAVEQDKNTQE
VFAQVKQIYKTPPIKDFGGFNFSQILPDPSKPSKRSFIEDLLFNKVTLADAGFIKQYGDCLGDIA
ARDLICAQKFNGLTVLPPLLTDEMIAQYTSALLAGTITSGWTFGAGAALQIPFAMQMAYRFNGIG
VTQNVLYENQKLIANQFNSAIGKIQDSLSSTPSALGKLQDVVNQNAQALNTLVKQLSSNFGAISS
VLNDILSRLDPPEAEVQIDRLITGRLQSLQTYVTQQLIRAAEIRASANLAATKMSECVLGQSKRV
DFCGKGYHLMSFPQSAPHGVVFLHVTYVPAQEKNFTTAPAICHDGKAHFPREGVFVSNGTHWFVT
QRNFYEPQIITTDNTFVSGNCDVVIGIVNNTVYDPLQPELDSFKEELDKYFKNHTSPDVDLGDIS
GINASVVNIQKEIDRLNEVAKNLNESLIDLQELGKYEQYIKWPWYIWLGFIAGLIAIVMVTIMLC
CMTSCCSCLKGCCSCGSCCKFDEDDSEPVLKGVKLHYT
SEQ ID NO 332: SEQ ID NO 195 + A942P + N532P
MFVFLVLLPLVSSQCVNLTTRTQLPPAYTNSFTRGVYYPDKVFRSSVLHSTQDLFLPFFSNVTWF
HAIHVSGTNGTKRFDNPVLPFNDGVYFASTEKSNIIRGWIFGTTLDSKTQSLLIVNNATNVVIKV
CEFQFCNDPFLGVYYHKNNKSWMESEFRVYSSANNCTFEYVSQPFLMDLEGKQGNFKNLREFVFK
NIDGYFKIYSKHTPINLVRDLPQGFSALEPLVDLPIGINITRFQTLLALHRSYLTPGDSSSGWTA
GAAAYYVGYLQPRTFLLKYNENGTITDAVDCALDPLSETKCTLKSFTVEKGIYQTSNFRVQPTES
IVRFPNITNLCPFGEVFNATRFASVYAWNRKRISNCVADYSVLYNSASFSTFKCYGVSPTKLNDL
CFTNVYADSFVIRGDEVRQIAPGQTGKIADYNYKLPDDFTGCVIAWNSNNLDSKVGGNYNYLYRL
FRKSNLKPFERDISTEIYQAGSTPCNGVEGFNCYFPLQSYGFQPTNGVGYQPYRVVVLSFELLHA
PATVCGPKKSTPLVKNKCVNFNFNGLTGTGVLTESNKKFLPFQQFGRDIADTTDAVRDPQTLEIL
DITPCSFGGVSVITPGTNTSNQVAVLYQDVNCTEVPVAIHADQLTPTWRVYSTGSNVFQTRAGCL
IGAEHVNNSYECDIPIGAGICASYQTQTNSPRRARSVASQSIIAYTMSLGAENSVAYSNNSIAIP
TNFTISVTTEILPVSMTKTSVDCTMYICGDSTECSNLLLQYGSFCTQLNRALTGIAVEQDKNTQE
VFAQVKQIYKTPPIKDFGGFNFSQILPDPSKPSKRSFIEDLLFNKVTLADAGFIKQYGDCLGDIA
ARDLICAQKFNGLTVLPPLLTDEMIAQYTSALLAGTITSGWTFGAGAALQIPFAMQMAYRFNGIG
VTQNVLYENQKLIANQFNSAIGKIQDSLSSTPSALGKLQDVVNQNAQALNTLVKQLSSNFGAISS
VLNDILSRLDPPEAEVQIDRLITGRLQSLQTYVTQQLIRAAEIRASANLAATKMSECVLGQSKRV
DFCGKGYHLMSFPQSAPHGVVFLHVTYVPAQEKNFTTAPAICHDGKAHFPREGVFVSNGTHWFVT
QRNFYEPQIITTDNTFVSGNCDVVIGIVNNTVYDPLQPELDSFKEELDKYFKNHTSPDVDLGDIS
GINASVVNIQKEIDRLNEVAKNLNESLIDLQELGKYEQYIKWPWYIWLGFIAGLIAIVMVTIMLC
CMTSCCSCLKGCCSCGSCCKFDEDDSEPVLKGVKLHYT
SEQ ID NO 333: SEQ ID NO 195 + A942P + G880C + F888C
MFVFLVLLPLVSSQCVNLTTRTQLPPAYTNSFTRGVYYPDKVFRSSVLHSTQDLFLPFFSNVTWF
HAIHVSGTNGTKRFDNPVLPFNDGVYFASTEKSNIIRGWIFGTTLDSKTQSLLIVNNATNVVIKV
CEFQFCNDPFLGVYYHKNNKSWMESEFRVYSSANNCTFEYVSQPFLMDLEGKQGNFKNLREFVFK
NIDGYFKIYSKHTPINLVRDLPQGFSALEPLVDLPIGINITRFQTLLALHRSYLTPGDSSSGWTA
GAAAYYVGYLQPRTFLLKYNENGTITDAVDCALDPLSETKCTLKSFTVEKGIYQTSNFRVQPTES
IVRFPNITNLCPFGEVFNATRFASVYAWNRKRISNCVADYSVLYNSASFSTFKCYGVSPTKLNDL
CFTNVYADSFVIRGDEVRQIAPGQTGKIADYNYKLPDDFTGCVIAWNSNNLDSKVGGNYNYLYRL
FRKSNLKPFERDISTEIYQAGSTPCNGVEGFNCYFPLQSYGFQPTNGVGYQPYRVVVLSFELLHA
PATVCGPKKSTNLVKNKCVNFNFNGLTGTGVLTESNKKFLPFQQFGRDIADTTDAVRDPQTLEIL
DITPCSFGGVSVITPGTNTSNQVAVLYQDVNCTEVPVAIHADQLTPTWRVYSTGSNVFQTRAGCL
IGAEHVNNSYECDIPIGAGICASYQTQTNSPRRARSVASQSIIAYTMSLGAENSVAYSNNSIAIP
TNFTISVTTEILPVSMTKTSVDCTMYICGDSTECSNLLLQYGSFCTQLNRALTGIAVEQDKNTQE
VFAQVKQIYKTPPIKDFGGFNFSQILPDPSKPSKRSFIEDLLFNKVTLADAGFIKQYGDCLGDIA
ARDLICAQKFNGLTVLPPLLTDEMIAQYTSALLACTITSGWTCGAGAALQIPFAMQMAYRFNGIG
VTQNVLYENQKLIANQFNSAIGKIQDSLSSTPSALGKLQDVVNQNAQALNTLVKQLSSNFGAISS
VLNDILSRLDPPEAEVQIDRLITGRLQSLQTYVTQQLIRAAEIRASANLAATKMSECVLGQSKRV
DFCGKGYHLMSFPQSAPHGVVFLHVTYVPAQEKNFTTAPAICHDGKAHFPREGVFVSNGTHWFVT
QRNFYEPQIITTDNTFVSGNCDVVIGIVNNTVYDPLQPELDSFKEELDKYFKNHTSPDVDLGDIS
GINASVVNIQKEIDRLNEVAKNLNESLIDLQELGKYEQYIKWPWYIWLGFIAGLIAIVMVTIMLC
CMTSCCSCLKGCCSCGSCCKFDEDDSEPVLKGVKLHYT
SEQ ID NO 334: SEQ ID NO 195 + A942P + S884C + A893C
MFVFLVLLPLVSSQCVNLTTRTQLPPAYTNSFTRGVYYPDKVFRSSVLHSTQDLFLPFFSNVTWF
HAIHVSGTNGTKRFDNPVLPFNDGVYFASTEKSNIIRGWIFGTTLDSKTQSLLIVNNATNVVIKV
CEFQFCNDPFLGVYYHKNNKSWMESEFRVYSSANNCTFEYVSQPFLMDLEGKQGNFKNLREFVFK
NIDGYFKIYSKHTPINLVRDLPQGFSALEPLVDLPIGINITRFQTLLALHRSYLTPGDSSSGWTA
GAAAYYVGYLQPRTFLLKYNENGTITDAVDCALDPLSETKCTLKSFTVEKGIYQTSNFRVQPTES
IVRFPNITNLCPFGEVFNATRFASVYAWNRKRISNCVADYSVLYNSASFSTFKCYGVSPTKLNDL
CFTNVYADSFVIRGDEVRQIAPGQTGKIADYNYKLPDDFTGCVIAWNSNNLDSKVGGNYNYLYRL
FRKSNLKPFERDISTEIYQAGSTPCNGVEGFNCYFPLQSYGFQPTNGVGYQPYRVVVLSFELLHA
PATVCGPKKSTNLVKNKCVNFNFNGLTGTGVLTESNKKFLPFQQFGRDIADTTDAVRDPQTLEIL
DITPCSFGGVSVITPGTNTSNQVAVLYQDVNCTEVPVAIHADQLTPTWRVYSTGSNVFQTRAGCL
IGAEHVNNSYECDIPIGAGICASYQTQTNSPRRARSVASQSIIAYTMSLGAENSVAYSNNSIAIP
TNFTISVTTEILPVSMTKTSVDCTMYICGDSTECSNLLLQYGSFCTQLNRALTGIAVEQDKNTQE
VFAQVKQIYKTPPIKDFGGFNFSQILPDPSKPSKRSFIEDLLFNKVTLADAGFIKQYGDCLGDIA
ARDLICAQKFNGLTVLPPLLTDEMIAQYTSALLAGTITCGWTFGAGACLQIPFAMQMAYRFNGIG
VTQNVLYENQKLIANQFNSAIGKIQDSLSSTPSALGKLQDVVNQNAQALNTLVKQLSSNFGAISS
VLNDILSRLDPPEAEVQIDRLITGRLQSLQTYVTQQLIRAAEIRASANLAATKMSECVLGQSKRV
DFCGKGYHLMSFPQSAPHGVVFLHVTYVPAQEKNFTTAPAICHDGKAHFPREGVFVSNGTHWFVT
QRNFYEPQIITTDNTFVSGNCDVVIGIVNNTVYDPLQPELDSFKEELDKYFKNHTSPDVDLGDIS
GINASVVNIQKEIDRLNEVAKNLNESLIDLQELGKYEQYIKWPWYIWLGFIAGLIAIVMVTIMLC
CMTSCCSCLKGCCSCGSCCKFDEDDSEPVLKGVKLHYT
SEQ ID NO 335: SEQ ID NO 195 + A892P + D614N
MFVFLVLLPLVSSQCVNLTTRTQLPPAYTNSFTRGVYYPDKVFRSSVLHSTQDLFLPFFSNVTWF
HAIHVSGTNGTKRFDNPVLPFNDGVYFASTEKSNIIRGWIFGTTLDSKTQSLLIVNNATNVVIKV
CEFQFCNDPFLGVYYHKNNKSWMESEFRVYSSANNCTFEYVSQPFLMDLEGKQGNFKNLREFVFK
NIDGYFKIYSKHTPINLVRDLPQGFSALEPLVDLPIGINITRFQTLLALHRSYLTPGDSSSGWTA
GAAAYYVGYLQPRTFLLKYNENGTITDAVDCALDPLSETKCTLKSFTVEKGIYQTSNFRVQPTES
IVRFPNITNLCPFGEVFNATRFASVYAWNRKRISNCVADYSVLYNSASFSTFKCYGVSPTKLNDL
CFTNVYADSFVIRGDEVRQIAPGQTGKIADYNYKLPDDFTGCVIAWNSNNLDSKVGGNYNYLYRL
FRKSNLKPFERDISTEIYQAGSTPCNGVEGFNCYFPLQSYGFQPTNGVGYQPYRVVVLSFELLHA
PATVCGPKKSTNLVKNKCVNFNFNGLTGTGVLTESNKKFLPFQQFGRDIADTTDAVRDPQTLEIL
DITPCSFGGVSVITPGTNTSNQVAVLYQNVNCTEVPVAIHADQLTPTWRVYSTGSNVFQTRAGCL
IGAEHVNNSYECDIPIGAGICASYQTQTNSPRRARSVASQSIIAYTMSLGAENSVAYSNNSIAIP
TNFTISVTTEILPVSMTKTSVDCTMYICGDSTECSNLLLQYGSFCTQLNRALTGIAVEQDKNTQE
VFAQVKQIYKTPPIKDFGGFNFSQILPDPSKPSKRSFIEDLLFNKVTLADAGFIKQYGDCLGDIA
ARDLICAQKFNGLTVLPPLLTDEMIAQYTSALLAGTITSGWTFGAGPALQIPFAMQMAYRFNGIG
VTQNVLYENQKLIANQFNSAIGKIQDSLSSTASALGKLQDVVNQNAQALNTLVKQLSSNFGAISS
VLNDILSRLDPPEAEVQIDRLITGRLQSLQTYVTQQLIRAAEIRASANLAATKMSECVLGQSKRV
DFCGKGYHLMSFPQSAPHGVVFLHVTYVPAQEKNFTTAPAICHDGKAHFPREGVFVSNGTHWFVT
QRNFYEPQIITTDNTFVSGNCDVVIGIVNNTVYDPLQPELDSFKEELDKYFKNHTSPDVDLGDIS
GINASVVNIQKEIDRLNEVAKNLNESLIDLQELGKYEQYIKWPWYIWLGFIAGLIAIVMVTIMLC
CMTSCCSCLKGCCSCGSCCKFDEDDSEPVLKGVKLHYT
SEQ ID NO 336: SEQ ID NO 195 + A892P + T572I
MFVFLVLLPLVSSQCVNLTTRTQLPPAYTNSFTRGVYYPDKVFRSSVLHSTQDLFLPFFSNVTWF
HAIHVSGTNGTKRFDNPVLPFNDGVYFASTEKSNIIRGWIFGTTLDSKTQSLLIVNNATNVVIKV
CEFQFCNDPFLGVYYHKNNKSWMESEFRVYSSANNCTFEYVSQPFLMDLEGKQGNFKNLREFVFK
NIDGYFKIYSKHTPINLVRDLPQGFSALEPLVDLPIGINITRFQTLLALHRSYLTPGDSSSGWTA
GAAAYYVGYLQPRTFLLKYNENGTITDAVDCALDPLSETKCTLKSFTVEKGIYQTSNFRVQPTES
IVRFPNITNLCPFGEVFNATRFASVYAWNRKRISNCVADYSVLYNSASFSTFKCYGVSPTKLNDL
CFTNVYADSFVIRGDEVRQIAPGQTGKIADYNYKLPDDFTGCVIAWNSNNLDSKVGGNYNYLYRL
FRKSNLKPFERDISTEIYQAGSTPCNGVEGFNCYFPLQSYGFQPTNGVGYQPYRVVVLSFELLHA
PATVCGPKKSTNLVKNKCVNFNFNGLTGTGVLTESNKKFLPFQQFGRDIADITDAVRDPQTLEIL
DITPCSFGGVSVITPGTNTSNQVAVLYQDVNCTEVPVAIHADQLTPTWRVYSTGSNVFQTRAGCL
IGAEHVNNSYECDIPIGAGICASYQTQTNSPRRARSVASQSIIAYTMSLGAENSVAYSNNSIAIP
TNFTISVTTEILPVSMTKTSVDCTMYICGDSTECSNLLLQYGSFCTQLNRALTGIAVEQDKNTQE
VFAQVKQIYKTPPIKDFGGFNFSQILPDPSKPSKRSFIEDLLFNKVTLADAGFIKQYGDCLGDIA
ARDLICAQKFNGLTVLPPLLTDEMIAQYTSALLAGTITSGWTFGAGPALQIPFAMQMAYRFNGIG
VTQNVLYENQKLIANQFNSAIGKIQDSLSSTASALGKLQDVVNQNAQALNTLVKQLSSNFGAISS
VLNDILSRLDPPEAEVQIDRLITGRLQSLQTYVTQQLIRAAEIRASANLAATKMSECVLGQSKRV
DFCGKGYHLMSFPQSAPHGVVFLHVTYVPAQEKNFTTAPAICHDGKAHFPREGVFVSNGTHWFVT
QRNFYEPQIITTDNTFVSGNCDVVIGIVNNTVYDPLQPELDSFKEELDKYFKNHTSPDVDLGDIS
GINASVVNIQKEIDRLNEVAKNLNESLIDLQELGKYEQYIKWPWYIWLGFIAGLIAIVMVTIMLC
CMTSCCSCLKGCCSCGSCCKFDEDDSEPVLKGVKLHYT
SEQ ID NO 337: SEQ ID NO 195 + A892P + N532P
MFVFLVLLPLVSSQCVNLTTRTQLPPAYTNSFTRGVYYPDKVFRSSVLHSTQDLFLPFFSNVTWF
HAIHVSGTNGTKRFDNPVLPFNDGVYFASTEKSNIIRGWIFGTTLDSKTQSLLIVNNATNVVIKV
CEFQFCNDPFLGVYYHKNNKSWMESEFRVYSSANNCTFEYVSQPFLMDLEGKQGNFKNLREFVFK
NIDGYFKIYSKHTPINLVRDLPQGFSALEPLVDLPIGINITRFQTLLALHRSYLTPGDSSSGWTA
GAAAYYVGYLQPRTFLLKYNENGTITDAVDCALDPLSETKCTLKSFTVEKGIYQTSNFRVQPTES
IVRFPNITNLCPFGEVFNATRFASVYAWNRKRISNCVADYSVLYNSASFSTFKCYGVSPTKLNDL
CFTNVYADSFVIRGDEVRQIAPGQTGKIADYNYKLPDDFTGCVIAWNSNNLDSKVGGNYNYLYRL
FRKSNLKPFERDISTEIYQAGSTPCNGVEGFNCYFPLQSYGFQPTNGVGYQPYRVVVLSFELLHA
PATVCGPKKSTPLVKNKCVNFNFNGLTGTGVLTESNKKFLPFQQFGRDIADTTDAVRDPQTLEIL
DITPCSFGGVSVITPGTNTSNQVAVLYQDVNCTEVPVAIHADQLTPTWRVYSTGSNVFQTRAGCL
IGAEHVNNSYECDIPIGAGICASYQTQTNSPRRARSVASQSIIAYTMSLGAENSVAYSNNSIAIP
TNFTISVTTEILPVSMTKTSVDCTMYICGDSTECSNLLLQYGSFCTQLNRALTGIAVEQDKNTQE
VFAQVKQIYKTPPIKDFGGFNFSQILPDPSKPSKRSFIEDLLFNKVTLADAGFIKQYGDCLGDIA
ARDLICAQKFNGLTVLPPLLTDEMIAQYTSALLAGTITSGWTFGAGPALQIPFAMQMAYRFNGIG
VTQNVLYENQKLIANQFNSAIGKIQDSLSSTASALGKLQDVVNQNAQALNTLVKQLSSNFGAISS
VLNDILSRLDPPEAEVQIDRLITGRLQSLQTYVTQQLIRAAEIRASANLAATKMSECVLGQSKRV
DFCGKGYHLMSFPQSAPHGVVFLHVTYVPAQEKNFTTAPAICHDGKAHFPREGVFVSNGTHWFVT
QRNFYEPQIITTDNTFVSGNCDVVIGIVNNTVYDPLQPELDSFKEELDKYFKNHTSPDVDLGDIS
GINASVVNIQKEIDRLNEVAKNLNESLIDLQELGKYEQYIKWPWYIWLGFIAGLIAIVMVTIMLC
CMTSCCSCLKGCCSCGSCCKFDEDDSEPVLKGVKLHYT
SEQ ID NO 338: SEQ ID NO 195 + A892P + G880C + F888C
MFVFLVLLPLVSSQCVNLTTRTQLPPAYTNSFTRGVYYPDKVFRSSVLHSTQDLFLPFFSNVTWF
HAIHVSGTNGTKRFDNPVLPFNDGVYFASTEKSNIIRGWIFGTTLDSKTQSLLIVNNATNVVIKV
CEFQFCNDPFLGVYYHKNNKSWMESEFRVYSSANNCTFEYVSQPFLMDLEGKQGNFKNLREFVFK
NIDGYFKIYSKHTPINLVRDLPQGFSALEPLVDLPIGINITRFQTLLALHRSYLTPGDSSSGWTA
GAAAYYVGYLQPRTFLLKYNENGTITDAVDCALDPLSETKCTLKSFTVEKGIYQTSNFRVQPTES
IVRFPNITNLCPFGEVFNATRFASVYAWNRKRISNCVADYSVLYNSASFSTFKCYGVSPTKLNDL
CFTNVYADSFVIRGDEVRQIAPGQTGKIADYNYKLPDDFTGCVIAWNSNNLDSKVGGNYNYLYRL
FRKSNLKPFERDISTEIYQAGSTPCNGVEGFNCYFPLQSYGFQPTNGVGYQPYRVVVLSFELLHA
PATVCGPKKSTNLVKNKCVNFNFNGLTGTGVLTESNKKFLPFQQFGRDIADTTDAVRDPQTLEIL
DITPCSFGGVSVITPGTNTSNQVAVLYQDVNCTEVPVAIHADQLTPTWRVYSTGSNVFQTRAGCL
IGAEHVNNSYECDIPIGAGICASYQTQTNSPRRARSVASQSIIAYTMSLGAENSVAYSNNSIAIP
TNFTISVTTEILPVSMTKTSVDCTMYICGDSTECSNLLLQYGSFCTQLNRALTGIAVEQDKNTQE
VFAQVKQIYKTPPIKDFGGFNFSQILPDPSKPSKRSFIEDLLFNKVTLADAGFIKQYGDCLGDIA
ARDLICAQKFNGLTVLPPLLTDEMIAQYTSALLACTITSGWTCGAGPALQIPFAMQMAYRFNGIG
VTQNVLYENQKLIANQFNSAIGKIQDSLSSTASALGKLQDVVNQNAQALNTLVKQLSSNFGAISS
VLNDILSRLDPPEAEVQIDRLITGRLQSLQTYVTQQLIRAAEIRASANLAATKMSECVLGQSKRV
DFCGKGYHLMSFPQSAPHGVVFLHVTYVPAQEKNFTTAPAICHDGKAHFPREGVFVSNGTHWFVT
QRNFYEPQIITTDNTFVSGNCDVVIGIVNNTVYDPLQPELDSFKEELDKYFKNHTSPDVDLGDIS
GINASVVNIQKEIDRLNEVAKNLNESLIDLQELGKYEQYIKWPWYIWLGFIAGLIAIVMVTIMLC
CMTSCCSCLKGCCSCGSCCKFDEDDSEPVLKGVKLHYT
SEQ ID NO 339: SEQ ID NO 195 + A892P + S884C + A893C
MFVFLVLLPLVSSQCVNLTTRTQLPPAYTNSFTRGVYYPDKVFRSSVLHSTQDLFLPFFSNVTWF
HAIHVSGTNGTKRFDNPVLPFNDGVYFASTEKSNIIRGWIFGTTLDSKTQSLLIVNNATNVVIKV
CEFQFCNDPFLGVYYHKNNKSWMESEFRVYSSANNCTFEYVSQPFLMDLEGKQGNFKNLREFVFK
NIDGYFKIYSKHTPINLVRDLPQGFSALEPLVDLPIGINITRFQTLLALHRSYLTPGDSSSGWTA
GAAAYYVGYLQPRTFLLKYNENGTITDAVDCALDPLSETKCTLKSFTVEKGIYQTSNFRVQPTES
IVRFPNITNLCPFGEVFNATRFASVYAWNRKRISNCVADYSVLYNSASFSTFKCYGVSPTKLNDL
CFTNVYADSFVIRGDEVRQIAPGQTGKIADYNYKLPDDFTGCVIAWNSNNLDSKVGGNYNYLYRL
FRKSNLKPFERDISTEIYQAGSTPCNGVEGFNCYFPLQSYGFQPTNGVGYQPYRVVVLSFELLHA
PATVCGPKKSTNLVKNKCVNFNFNGLTGTGVLTESNKKFLPFQQFGRDIADTTDAVRDPQTLEIL
DITPCSFGGVSVITPGTNTSNQVAVLYQDVNCTEVPVAIHADQLTPTWRVYSTGSNVFQTRAGCL
IGAEHVNNSYECDIPIGAGICASYQTQTNSPRRARSVASQSIIAYTMSLGAENSVAYSNNSIAIP
TNFTISVTTEILPVSMTKTSVDCTMYICGDSTECSNLLLQYGSFCTQLNRALTGIAVEQDKNTQE
VFAQVKQIYKTPPIKDFGGFNFSQILPDPSKPSKRSFIEDLLFNKVTLADAGFIKQYGDCLGDIA
ARDLICAQKFNGLTVLPPLLTDEMIAQYTSALLAGTITCGWTFGAGPCLQIPFAMQMAYRFNGIG
VTQNVLYENQKLIANQFNSAIGKIQDSLSSTASALGKLQDVVNQNAQALNTLVKQLSSNFGAISS
VLNDILSRLDPPEAEVQIDRLITGRLQSLQTYVTQQLIRAAEIRASANLAATKMSECVLGQSKRV
DFCGKGYHLMSFPQSAPHGVVFLHVTYVPAQEKNFTTAPAICHDGKAHFPREGVFVSNGTHWFVT
QRNFYEPQIITTDNTFVSGNCDVVIGIVNNTVYDPLQPELDSFKEELDKYFKNHTSPDVDLGDIS
GINASVVNIQKEIDRLNEVAKNLNESLIDLQELGKYEQYIKWPWYIWLGFIAGLIAIVMVTIMLC
CMTSCCSCLKGCCSCGSCCKFDEDDSEPVLKGVKLHYT
SEQ ID NO 340: SEQ ID NO 195 + D614N + T572I
MFVFLVLLPLVSSQCVNLTTRTQLPPAYTNSFTRGVYYPDKVFRSSVLHSTQDLFLPFFSNVTWF
HAIHVSGTNGTKRFDNPVLPFNDGVYFASTEKSNIIRGWIFGTTLDSKTQSLLIVNNATNVVIKV
CEFQFCNDPFLGVYYHKNNKSWMESEFRVYSSANNCTFEYVSQPFLMDLEGKQGNFKNLREFVFK
NIDGYFKIYSKHTPINLVRDLPQGFSALEPLVDLPIGINITRFQTLLALHRSYLTPGDSSSGWTA
GAAAYYVGYLQPRTFLLKYNENGTITDAVDCALDPLSETKCTLKSFTVEKGIYQTSNFRVQPTES
IVRFPNITNLCPFGEVFNATRFASVYAWNRKRISNCVADYSVLYNSASFSTFKCYGVSPTKLNDL
CFTNVYADSFVIRGDEVRQIAPGQTGKIADYNYKLPDDFTGCVIAWNSNNLDSKVGGNYNYLYRL
FRKSNLKPFERDISTEIYQAGSTPCNGVEGFNCYFPLQSYGFQPTNGVGYQPYRVVVLSFELLHA
PATVCGPKKSTNLVKNKCVNFNFNGLTGTGVLTESNKKFLPFQQFGRDIADITDAVRDPQTLEIL
DITPCSFGGVSVITPGTNTSNQVAVLYQNVNCTEVPVAIHADQLTPTWRVYSTGSNVFQTRAGCL
IGAEHVNNSYECDIPIGAGICASYQTQTNSPRRARSVASQSIIAYTMSLGAENSVAYSNNSIAIP
TNFTISVTTEILPVSMTKTSVDCTMYICGDSTECSNLLLQYGSFCTQLNRALTGIAVEQDKNTQE
VFAQVKQIYKTPPIKDFGGFNFSQILPDPSKPSKRSFIEDLLFNKVTLADAGFIKQYGDCLGDIA
ARDLICAQKFNGLTVLPPLLTDEMIAQYTSALLAGTITSGWTFGAGAALQIPFAMQMAYRFNGIG
VTQNVLYENQKLIANQFNSAIGKIQDSLSSTASALGKLQDVVNQNAQALNTLVKQLSSNFGAISS
VLNDILSRLDPPEAEVQIDRLITGRLQSLQTYVTQQLIRAAEIRASANLAATKMSECVLGQSKRV
DFCGKGYHLMSFPQSAPHGVVFLHVTYVPAQEKNFTTAPAICHDGKAHFPREGVFVSNGTHWFVT
QRNFYEPQIITTDNTFVSGNCDVVIGIVNNTVYDPLQPELDSFKEELDKYFKNHTSPDVDLGDIS
GINASVVNIQKEIDRLNEVAKNLNESLIDLQELGKYEQYIKWPWYIWLGFIAGLIAIVMVTIMLC
CMTSCCSCLKGCCSCGSCCKFDEDDSEPVLKGVKLHYT
SEQ ID NO 341: SEQ ID NO 195 + D614N + N532P
MFVFLVLLPLVSSQCVNLTTRTQLPPAYTNSFTRGVYYPDKVFRSSVLHSTQDLFLPFFSNVTWF
HAIHVSGTNGTKRFDNPVLPFNDGVYFASTEKSNIIRGWIFGTTLDSKTQSLLIVNNATNVVIKV
CEFQFCNDPFLGVYYHKNNKSWMESEFRVYSSANNCTFEYVSQPFLMDLEGKQGNFKNLREFVFK
NIDGYFKIYSKHTPINLVRDLPQGFSALEPLVDLPIGINITRFQTLLALHRSYLTPGDSSSGWTA
GAAAYYVGYLQPRTFLLKYNENGTITDAVDCALDPLSETKCTLKSFTVEKGIYQTSNFRVQPTES
IVRFPNITNLCPFGEVFNATRFASVYAWNRKRISNCVADYSVLYNSASFSTFKCYGVSPTKLNDL
CFTNVYADSFVIRGDEVRQIAPGQTGKIADYNYKLPDDFTGCVIAWNSNNLDSKVGGNYNYLYRL
FRKSNLKPFERDISTEIYQAGSTPCNGVEGFNCYFPLQSYGFQPTNGVGYQPYRVVVLSFELLHA
PATVCGPKKSTPLVKNKCVNFNFNGLTGTGVLTESNKKFLPFQQFGRDIADTTDAVRDPQTLEIL
DITPCSFGGVSVITPGTNTSNQVAVLYQNVNCTEVPVAIHADQLTPTWRVYSTGSNVFQTRAGCL
IGAEHVNNSYECDIPIGAGICASYQTQTNSPRRARSVASQSIIAYTMSLGAENSVAYSNNSIAIP
TNFTISVTTEILPVSMTKTSVDCTMYICGDSTECSNLLLQYGSFCTQLNRALTGIAVEQDKNTQE
VFAQVKQIYKTPPIKDFGGFNFSQILPDPSKPSKRSFIEDLLFNKVTLADAGFIKQYGDCLGDIA
ARDLICAQKFNGLTVLPPLLTDEMIAQYTSALLAGTITSGWTFGAGAALQIPFAMQMAYRFNGIG
VTQNVLYENQKLIANQFNSAIGKIQDSLSSTASALGKLQDVVNQNAQALNTLVKQLSSNFGAISS
VLNDILSRLDPPEAEVQIDRLITGRLQSLQTYVTQQLIRAAEIRASANLAATKMSECVLGQSKRV
DFCGKGYHLMSFPQSAPHGVVFLHVTYVPAQEKNFTTAPAICHDGKAHFPREGVFVSNGTHWFVT
QRNFYEPQIITTDNTFVSGNCDVVIGIVNNTVYDPLQPELDSFKEELDKYFKNHTSPDVDLGDIS
GINASVVNIQKEIDRLNEVAKNLNESLIDLQELGKYEQYIKWPWYIWLGFIAGLIAIVMVTIMLC
CMTSCCSCLKGCCSCGSCCKFDEDDSEPVLKGVKLHYT
SEQ ID NO 342: SEQ ID NO 195 + D614N + G880C + F888C
MFVFLVLLPLVSSQCVNLTTRTQLPPAYTNSFTRGVYYPDKVFRSSVLHSTQDLFLPFFSNVTWF
HAIHVSGTNGTKRFDNPVLPFNDGVYFASTEKSNIIRGWIFGTTLDSKTQSLLIVNNATNVVIKV
CEFQFCNDPFLGVYYHKNNKSWMESEFRVYSSANNCTFEYVSQPFLMDLEGKQGNFKNLREFVFK
NIDGYFKIYSKHTPINLVRDLPQGFSALEPLVDLPIGINITRFQTLLALHRSYLTPGDSSSGWTA
GAAAYYVGYLQPRTFLLKYNENGTITDAVDCALDPLSETKCTLKSFTVEKGIYQTSNFRVQPTES
IVRFPNITNLCPFGEVFNATRFASVYAWNRKRISNCVADYSVLYNSASFSTFKCYGVSPTKLNDL
CFTNVYADSFVIRGDEVRQIAPGQTGKIADYNYKLPDDFTGCVIAWNSNNLDSKVGGNYNYLYRL
FRKSNLKPFERDISTEIYQAGSTPCNGVEGFNCYFPLQSYGFQPTNGVGYQPYRVVVLSFELLHA
PATVCGPKKSTNLVKNKCVNFNFNGLTGTGVLTESNKKFLPFQQFGRDIADTTDAVRDPQTLEIL
DITPCSFGGVSVITPGTNTSNQVAVLYQNVNCTEVPVAIHADQLTPTWRVYSTGSNVFQTRAGCL
IGAEHVNNSYECDIPIGAGICASYQTQTNSPRRARSVASQSIIAYTMSLGAENSVAYSNNSIAIP
TNFTISVTTEILPVSMTKTSVDCTMYICGDSTECSNLLLQYGSFCTQLNRALTGIAVEQDKNTQE
VFAQVKQIYKTPPIKDFGGFNFSQILPDPSKPSKRSFIEDLLFNKVTLADAGFIKQYGDCLGDIA
ARDLICAQKFNGLTVLPPLLTDEMIAQYTSALLACTITSGWTCGAGAALQIPFAMQMAYRFNGIG
VTQNVLYENQKLIANQFNSAIGKIQDSLSSTASALGKLQDVVNQNAQALNTLVKQLSSNFGAISS
VLNDILSRLDPPEAEVQIDRLITGRLQSLQTYVTQQLIRAAEIRASANLAATKMSECVLGQSKRV
DFCGKGYHLMSFPQSAPHGVVFLHVTYVPAQEKNFTTAPAICHDGKAHFPREGVFVSNGTHWFVT
QRNFYEPQIITTDNTFVSGNCDVVIGIVNNTVYDPLQPELDSFKEELDKYFKNHTSPDVDLGDIS
GINASVVNIQKEIDRLNEVAKNLNESLIDLQELGKYEQYIKWPWYIWLGFIAGLIAIVMVTIMLC
CMTSCCSCLKGCCSCGSCCKFDEDDSEPVLKGVKLHYT
SEQ ID NO 343: SEQ ID NO 195 + D614N + S884C + A893C
MFVFLVLLPLVSSQCVNLTTRTQLPPAYTNSFTRGVYYPDKVFRSSVLHSTQDLFLPFFSNVTWF
HAIHVSGTNGTKRFDNPVLPFNDGVYFASTEKSNIIRGWIFGTTLDSKTQSLLIVNNATNVVIKV
CEFQFCNDPFLGVYYHKNNKSWMESEFRVYSSANNCTFEYVSQPFLMDLEGKQGNFKNLREFVFK
NIDGYFKIYSKHTPINLVRDLPQGFSALEPLVDLPIGINITRFQTLLALHRSYLTPGDSSSGWTA
GAAAYYVGYLQPRTFLLKYNENGTITDAVDCALDPLSETKCTLKSFTVEKGIYQTSNFRVQPTES
IVRFPNITNLCPFGEVFNATRFASVYAWNRKRISNCVADYSVLYNSASFSTFKCYGVSPTKLNDL
CFTNVYADSFVIRGDEVRQIAPGQTGKIADYNYKLPDDFTGCVIAWNSNNLDSKVGGNYNYLYRL
FRKSNLKPFERDISTEIYQAGSTPCNGVEGFNCYFPLQSYGFQPTNGVGYQPYRVVVLSFELLHA
PATVCGPKKSTNLVKNKCVNFNFNGLTGTGVLTESNKKFLPFQQFGRDIADTTDAVRDPQTLEIL
DITPCSFGGVSVITPGTNTSNQVAVLYQNVNCTEVPVAIHADQLTPTWRVYSTGSNVFQTRAGCL
IGAEHVNNSYECDIPIGAGICASYQTQTNSPRRARSVASQSIIAYTMSLGAENSVAYSNNSIAIP
TNFTISVTTEILPVSMTKTSVDCTMYICGDSTECSNLLLQYGSFCTQLNRALTGIAVEQDKNTQE
VFAQVKQIYKTPPIKDFGGFNFSQILPDPSKPSKRSFIEDLLFNKVTLADAGFIKQYGDCLGDIA
ARDLICAQKFNGLTVLPPLLTDEMIAQYTSALLAGTITCGWTFGAGACLQIPFAMQMAYRFNGIG
VTQNVLYENQKLIANQFNSAIGKIQDSLSSTASALGKLQDVVNQNAQALNTLVKQLSSNFGAISS
VLNDILSRLDPPEAEVQIDRLITGRLQSLQTYVTQQLIRAAEIRASANLAATKMSECVLGQSKRV
DFCGKGYHLMSFPQSAPHGVVFLHVTYVPAQEKNFTTAPAICHDGKAHFPREGVFVSNGTHWFVT
QRNFYEPQIITTDNTFVSGNCDVVIGIVNNTVYDPLQPELDSFKEELDKYFKNHTSPDVDLGDIS
GINASVVNIQKEIDRLNEVAKNLNESLIDLQELGKYEQYIKWPWYIWLGFIAGLIAIVMVTIMLC
CMTSCCSCLKGCCSCGSCCKFDEDDSEPVLKGVKLHYT
SEQ ID NO 344: SEQ ID NO 195 + T572I +
N532P
MFVFLVLLPLVSSQCVNLTTRTQLPPAYTNSFTRGVYYPDKVFRSSVLHSTQDLFLPFFSNVTWF
HAIHVSGTNGTKRFDNPVLPFNDGVYFASTEKSNIIRGWIFGTTLDSKTQSLLIVNNATNVVIKV
CEFQFCNDPFLGVYYHKNNKSWMESEFRVYSSANNCTFEYVSQPFLMDLEGKQGNFKNLREFVFK
NIDGYFKIYSKHTPINLVRDLPQGFSALEPLVDLPIGINITRFQTLLALHRSYLTPGDSSSGWTA
GAAAYYVGYLQPRTFLLKYNENGTITDAVDCALDPLSETKCTLKSFTVEKGIYQTSNFRVQPTES
IVRFPNITNLCPFGEVFNATRFASVYAWNRKRISNCVADYSVLYNSASFSTFKCYGVSPTKLNDL
CFTNVYADSFVIRGDEVRQIAPGQTGKIADYNYKLPDDFTGCVIAWNSNNLDSKVGGNYNYLYRL
FRKSNLKPFERDISTEIYQAGSTPCNGVEGFNCYFPLQSYGFQPTNGVGYQPYRVVVLSFELLHA
PATVCGPKKSTPLVKNKCVNFNFNGLTGTGVLTESNKKFLPFQQFGRDIADITDAVRDPQTLEIL
DITPCSFGGVSVITPGTNTSNQVAVLYQDVNCTEVPVAIHADQLTPTWRVYSTGSNVFQTRAGCL
IGAEHVNNSYECDIPIGAGICASYQTQTNSPRRARSVASQSIIAYTMSLGAENSVAYSNNSIAIP
TNFTISVTTEILPVSMTKTSVDCTMYICGDSTECSNLLLQYGSFCTQLNRALTGIAVEQDKNTQE
VFAQVKQIYKTPPIKDFGGFNFSQILPDPSKPSKRSFIEDLLFNKVTLADAGFIKQYGDCLGDIA
ARDLICAQKFNGLTVLPPLLTDEMIAQYTSALLAGTITSGWTFGAGAALQIPFAMQMAYRFNGIG
VTQNVLYENQKLIANQFNSAIGKIQDSLSSTASALGKLQDVVNQNAQALNTLVKQLSSNFGAISS
VLNDILSRLDPPEAEVQIDRLITGRLQSLQTYVTQQLIRAAEIRASANLAATKMSECVLGQSKRV
DFCGKGYHLMSFPQSAPHGVVFLHVTYVPAQEKNFTTAPAICHDGKAHFPREGVFVSNGTHWFVT
QRNFYEPQIITTDNTFVSGNCDVVIGIVNNTVYDPLQPELDSFKEELDKYFKNHTSPDVDLGDIS
GINASVVNIQKEIDRLNEVAKNLNESLIDLQELGKYEQYIKWPWYIWLGFIAGLIAIVMVTIMLC
CMTSCCSCLKGCCSCGSCCKFDEDDSEPVLKGVKLHYT
SEQ ID NO 345: SEQ ID NO 195 + T572I +
G880C + F888C
MFVFLVLLPLVSSQCVNLTTRTQLPPAYTNSFTRGVYYPDKVFRSSVLHSTQDLFLPFFSNVTWF
HAIHVSGTNGTKRFDNPVLPFNDGVYFASTEKSNIIRGWIFGTTLDSKTQSLLIVNNATNVVIKV
CEFQFCNDPFLGVYYHKNNKSWMESEFRVYSSANNCTFEYVSQPFLMDLEGKQGNFKNLREFVFK
NIDGYFKIYSKHTPINLVRDLPQGFSALEPLVDLPIGINITRFQTLLALHRSYLTPGDSSSGWTA
GAAAYYVGYLQPRTFLLKYNENGTITDAVDCALDPLSETKCTLKSFTVEKGIYQTSNFRVQPTES
IVRFPNITNLCPFGEVFNATRFASVYAWNRKRISNCVADYSVLYNSASFSTFKCYGVSPTKLNDL
CFTNVYADSFVIRGDEVRQIAPGQTGKIADYNYKLPDDFTGCVIAWNSNNLDSKVGGNYNYLYRL
FRKSNLKPFERDISTEIYQAGSTPCNGVEGFNCYFPLQSYGFQPTNGVGYQPYRVVVLSFELLHA
PATVCGPKKSTNLVKNKCVNFNFNGLTGTGVLTESNKKFLPFQQFGRDIADITDAVRDPQTLEIL
DITPCSFGGVSVITPGTNTSNQVAVLYQDVNCTEVPVAIHADQLTPTWRVYSTGSNVFQTRAGCL
IGAEHVNNSYECDIPIGAGICASYQTQTNSPRRARSVASQSIIAYTMSLGAENSVAYSNNSIAIP
TNFTISVTTEILPVSMTKTSVDCTMYICGDSTECSNLLLQYGSFCTQLNRALTGIAVEQDKNTQE
VFAQVKQIYKTPPIKDFGGFNFSQILPDPSKPSKRSFIEDLLFNKVTLADAGFIKQYGDCLGDIA
ARDLICAQKFNGLTVLPPLLTDEMIAQYTSALLACTITSGWTCGAGAALQIPFAMQMAYRFNGIG
VTQNVLYENQKLIANQFNSAIGKIQDSLSSTASALGKLQDVVNQNAQALNTLVKQLSSNFGAISS
VLNDILSRLDPPEAEVQIDRLITGRLQSLQTYVTQQLIRAAEIRASANLAATKMSECVLGQSKRV
DFCGKGYHLMSFPQSAPHGVVFLHVTYVPAQEKNFTTAPAICHDGKAHFPREGVFVSNGTHWFVT
QRNFYEPQIITTDNTFVSGNCDVVIGIVNNTVYDPLQPELDSFKEELDKYFKNHTSPDVDLGDIS
GINASVVNIQKEIDRLNEVAKNLNESLIDLQELGKYEQYIKWPWYIWLGFIAGLIAIVMVTIMLC
CMTSCCSCLKGCCSCGSCCKFDEDDSEPVLKGVKLHYT
SEQ ID NO 346: SEQ ID NO 195 + T572I +
S884C + A893C
MFVFLVLLPLVSSQCVNLTTRTQLPPAYTNSFTRGVYYPDKVFRSSVLHSTQDLFLPFFSNVTWF
HAIHVSGTNGTKRFDNPVLPFNDGVYFASTEKSNIIRGWIFGTTLDSKTQSLLIVNNATNVVIKV
CEFQFCNDPFLGVYYHKNNKSWMESEFRVYSSANNCTFEYVSQPFLMDLEGKQGNFKNLREFVFK
NIDGYFKIYSKHTPINLVRDLPQGFSALEPLVDLPIGINITRFQTLLALHRSYLTPGDSSSGWTA
GAAAYYVGYLQPRTFLLKYNENGTITDAVDCALDPLSETKCTLKSFTVEKGIYQTSNFRVQPTES
IVRFPNITNLCPFGEVFNATRFASVYAWNRKRISNCVADYSVLYNSASFSTFKCYGVSPTKLNDL
CFTNVYADSFVIRGDEVRQIAPGQTGKIADYNYKLPDDFTGCVIAWNSNNLDSKVGGNYNYLYRL
FRKSNLKPFERDISTEIYQAGSTPCNGVEGFNCYFPLQSYGFQPTNGVGYQPYRVVVLSFELLHA
PATVCGPKKSTNLVKNKCVNFNFNGLTGTGVLTESNKKFLPFQQFGRDIADITDAVRDPQTLEIL
DITPCSFGGVSVITPGTNTSNQVAVLYQDVNCTEVPVAIHADQLTPTWRVYSTGSNVFQTRAGCL
IGAEHVNNSYECDIPIGAGICASYQTQTNSPRRARSVASQSIIAYTMSLGAENSVAYSNNSIAIP
TNFTISVTTEILPVSMTKTSVDCTMYICGDSTECSNLLLQYGSFCTQLNRALTGIAVEQDKNTQE
VFAQVKQIYKTPPIKDFGGFNFSQILPDPSKPSKRSFIEDLLFNKVTLADAGFIKQYGDCLGDIA
ARDLICAQKFNGLTVLPPLLTDEMIAQYTSALLAGTITCGWTFGAGACLQIPFAMQMAYRFNGIG
VTQNVLYENQKLIANQFNSAIGKIQDSLSSTASALGKLQDVVNQNAQALNTLVKQLSSNFGAISS
VLNDILSRLDPPEAEVQIDRLITGRLQSLQTYVTQQLIRAAEIRASANLAATKMSECVLGQSKRV
DFCGKGYHLMSFPQSAPHGVVFLHVTYVPAQEKNFTTAPAICHDGKAHFPREGVFVSNGTHWFVT
QRNFYEPQIITTDNTFVSGNCDVVIGIVNNTVYDPLQPELDSFKEELDKYFKNHTSPDVDLGDIS
GINASVVNIQKEIDRLNEVAKNLNESLIDLQELGKYEQYIKWPWYIWLGFIAGLIAIVMVTIMLC
CMTSCCSCLKGCCSCGSCCKFDEDDSEPVLKGVKLHYT
SEQ ID NO 347: SEQ ID NO 195 + N532P + G880C + F888C
MFVFLVLLPLVSSQCVNLTTRTQLPPAYTNSFTRGVYYPDKVFRSSVLHSTQDLFLPFFSNVTWF
HAIHVSGTNGTKRFDNPVLPFNDGVYFASTEKSNIIRGWIFGTTLDSKTQSLLIVNNATNVVIKV
CEFQFCNDPFLGVYYHKNNKSWMESEFRVYSSANNCTFEYVSQPFLMDLEGKQGNFKNLREFVFK
NIDGYFKIYSKHTPINLVRDLPQGFSALEPLVDLPIGINITRFQTLLALHRSYLTPGDSSSGWTA
GAAAYYVGYLQPRTFLLKYNENGTITDAVDCALDPLSETKCTLKSFTVEKGIYQTSNFRVQPTES
IVRFPNITNLCPFGEVFNATRFASVYAWNRKRISNCVADYSVLYNSASFSTFKCYGVSPTKLNDL
CFTNVYADSFVIRGDEVRQIAPGQTGKIADYNYKLPDDFTGCVIAWNSNNLDSKVGGNYNYLYRL
FRKSNLKPFERDISTEIYQAGSTPCNGVEGFNCYFPLQSYGFQPTNGVGYQPYRVVVLSFELLHA
PATVCGPKKSTPLVKNKCVNFNFNGLTGTGVLTESNKKFLPFQQFGRDIADTTDAVRDPQTLEIL
DITPCSFGGVSVITPGTNTSNQVAVLYQDVNCTEVPVAIHADQLTPTWRVYSTGSNVFQTRAGCL
IGAEHVNNSYECDIPIGAGICASYQTQTNSPRRARSVASQSIIAYTMSLGAENSVAYSNNSIAIP
TNFTISVTTEILPVSMTKTSVDCTMYICGDSTECSNLLLQYGSFCTQLNRALTGIAVEQDKNTQE
VFAQVKQIYKTPPIKDFGGFNFSQILPDPSKPSKRSFIEDLLFNKVTLADAGFIKQYGDCLGDIA
ARDLICAQKFNGLTVLPPLLTDEMIAQYTSALLACTITSGWTCGAGAALQIPFAMQMAYRFNGIG
VTQNVLYENQKLIANQFNSAIGKIQDSLSSTASALGKLQDVVNQNAQALNTLVKQLSSNFGAISS
VLNDILSRLDPPEAEVQIDRLITGRLQSLQTYVTQQLIRAAEIRASANLAATKMSECVLGQSKRV
DFCGKGYHLMSFPQSAPHGVVFLHVTYVPAQEKNFTTAPAICHDGKAHFPREGVFVSNGTHWFVT
QRNFYEPQIITTDNTFVSGNCDVVIGIVNNTVYDPLQPELDSFKEELDKYFKNHTSPDVDLGDIS
GINASVVNIQKEIDRLNEVAKNLNESLIDLQELGKYEQYIKWPWYIWLGFIAGLIAIVMVTIMLC
CMTSCCSCLKGCCSCGSCCKFDEDDSEPVLKGVKLHYT
SEQ ID NO 348: SEQ ID NO 195 + N532P + S884C + A893C
MFVFLVLLPLVSSQCVNLTTRTQLPPAYTNSFTRGVYYPDKVFRSSVLHSTQDLFLPFFSNVTWF
HAIHVSGTNGTKRFDNPVLPFNDGVYFASTEKSNIIRGWIFGTTLDSKTQSLLIVNNATNVVIKV
CEFQFCNDPFLGVYYHKNNKSWMESEFRVYSSANNCTFEYVSQPFLMDLEGKQGNFKNLREFVFK
NIDGYFKIYSKHTPINLVRDLPQGFSALEPLVDLPIGINITRFQTLLALHRSYLTPGDSSSGWTA
GAAAYYVGYLQPRTFLLKYNENGTITDAVDCALDPLSETKCTLKSFTVEKGIYQTSNFRVQPTES
IVRFPNITNLCPFGEVFNATRFASVYAWNRKRISNCVADYSVLYNSASFSTFKCYGVSPTKLNDL
CFTNVYADSFVIRGDEVRQIAPGQTGKIADYNYKLPDDFTGCVIAWNSNNLDSKVGGNYNYLYRL
FRKSNLKPFERDISTEIYQAGSTPCNGVEGFNCYFPLQSYGFQPTNGVGYQPYRVVVLSFELLHA
PATVCGPKKSTPLVKNKCVNFNFNGLTGTGVLTESNKKFLPFQQFGRDIADTTDAVRDPQTLEIL
DITPCSFGGVSVITPGTNTSNQVAVLYQDVNCTEVPVAIHADQLTPTWRVYSTGSNVFQTRAGCL
IGAEHVNNSYECDIPIGAGICASYQTQTNSPRRARSVASQSIIAYTMSLGAENSVAYSNNSIAIP
TNFTISVTTEILPVSMTKTSVDCTMYICGDSTECSNLLLQYGSFCTQLNRALTGIAVEQDKNTQE
VFAQVKQIYKTPPIKDFGGFNFSQILPDPSKPSKRSFIEDLLFNKVTLADAGFIKQYGDCLGDIA
ARDLICAQKFNGLTVLPPLLTDEMIAQYTSALLAGTITCGWTFGAGACLQIPFAMQMAYRFNGIG
VTQNVLYENQKLIANQFNSAIGKIQDSLSSTASALGKLQDVVNQNAQALNTLVKQLSSNFGAISS
VLNDILSRLDPPEAEVQIDRLITGRLQSLQTYVTQQLIRAAEIRASANLAATKMSECVLGQSKRV
DFCGKGYHLMSFPQSAPHGVVFLHVTYVPAQEKNFTTAPAICHDGKAHFPREGVFVSNGTHWFVT
QRNFYEPQIITTDNTFVSGNCDVVIGIVNNTVYDPLQPELDSFKEELDKYFKNHTSPDVDLGDIS
GINASVVNIQKEIDRLNEVAKNLNESLIDLQELGKYEQYIKWPWYIWLGFIAGLIAIVMVTIMLC
CMTSCCSCLKGCCSCGSCCKFDEDDSEPVLKGVKLHYT
SEQ ID NO 349: SEQ ID NO 195 + A942P + A892P + D614N
MFVFLVLLPLVSSQCVNLTTRTQLPPAYTNSFTRGVYYPDKVFRSSVLHSTQDLFLPFFSNVTWF
HAIHVSGTNGTKRFDNPVLPFNDGVYFASTEKSNIIRGWIFGTTLDSKTQSLLIVNNATNVVIKV
CEFQFCNDPFLGVYYHKNNKSWMESEFRVYSSANNCTFEYVSQPFLMDLEGKQGNFKNLREFVFK
NIDGYFKIYSKHTPINLVRDLPQGFSALEPLVDLPIGINITRFQTLLALHRSYLTPGDSSSGWTA
GAAAYYVGYLQPRTFLLKYNENGTITDAVDCALDPLSETKCTLKSFTVEKGIYQTSNFRVQPTES
IVRFPNITNLCPFGEVFNATRFASVYAWNRKRISNCVADYSVLYNSASFSTFKCYGVSPTKLNDL
CFTNVYADSFVIRGDEVRQIAPGQTGKIADYNYKLPDDFTGCVIAWNSNNLDSKVGGNYNYLYRL
FRKSNLKPFERDISTEIYQAGSTPCNGVEGFNCYFPLQSYGFQPTNGVGYQPYRVVVLSFELLHA
PATVCGPKKSTNLVKNKCVNFNFNGLTGTGVLTESNKKFLPFQQFGRDIADTTDAVRDPQTLEIL
DITPCSFGGVSVITPGTNTSNQVAVLYQNVNCTEVPVAIHADQLTPTWRVYSTGSNVFQTRAGCL
IGAEHVNNSYECDIPIGAGICASYQTQTNSPRRARSVASQSIIAYTMSLGAENSVAYSNNSIAIP
TNFTISVTTEILPVSMTKTSVDCTMYICGDSTECSNLLLQYGSFCTQLNRALTGIAVEQDKNTQE
VFAQVKQIYKTPPIKDFGGFNFSQILPDPSKPSKRSFIEDLLFNKVTLADAGFIKQYGDCLGDIA
ARDLICAQKFNGLTVLPPLLTDEMIAQYTSALLAGTITSGWTFGAGPALQIPFAMQMAYRFNGIG
VTQNVLYENQKLIANQFNSAIGKIQDSLSSTPSALGKLQDVVNQNAQALNTLVKQLSSNFGAISS
VLNDILSRLDPPEAEVQIDRLITGRLQSLQTYVTQQLIRAAEIRASANLAATKMSECVLGQSKRV
DFCGKGYHLMSFPQSAPHGVVFLHVTYVPAQEKNFTTAPAICHDGKAHFPREGVFVSNGTHWFVT
QRNFYEPQIITTDNTFVSGNCDVVIGIVNNTVYDPLQPELDSFKEELDKYFKNHTSPDVDLGDIS
GINASVVNIQKEIDRLNEVAKNLNESLIDLQELGKYEQYIKWPWYIWLGFIAGLIAIVMVTIMLC
CMTSCCSCLKGCCSCGSCCKFDEDDSEPVLKGVKLHYT
SEQ ID NO 350: SEQ ID NO 195 + A942P + A892P + T572I
MFVFLVLLPLVSSQCVNLTTRTQLPPAYTNSFTRGVYYPDKVFRSSVLHSTQDLFLPFFSNVTWF
HAIHVSGTNGTKRFDNPVLPFNDGVYFASTEKSNIIRGWIFGTTLDSKTQSLLIVNNATNVVIKV
CEFQFCNDPFLGVYYHKNNKSWMESEFRVYSSANNCTFEYVSQPFLMDLEGKQGNFKNLREFVFK
NIDGYFKIYSKHTPINLVRDLPQGFSALEPLVDLPIGINITRFQTLLALHRSYLTPGDSSSGWTA
GAAAYYVGYLQPRTFLLKYNENGTITDAVDCALDPLSETKCTLKSFTVEKGIYQTSNFRVQPTES
IVRFPNITNLCPFGEVFNATRFASVYAWNRKRISNCVADYSVLYNSASFSTFKCYGVSPTKLNDL
CFTNVYADSFVIRGDEVRQIAPGQTGKIADYNYKLPDDFTGCVIAWNSNNLDSKVGGNYNYLYRL
FRKSNLKPFERDISTEIYQAGSTPCNGVEGFNCYFPLQSYGFQPTNGVGYQPYRVVVLSFELLHA
PATVCGPKKSTNLVKNKCVNFNFNGLTGTGVLTESNKKFLPFQQFGRDIADITDAVRDPQTLEIL
DITPCSFGGVSVITPGTNTSNQVAVLYQDVNCTEVPVAIHADQLTPTWRVYSTGSNVFQTRAGCL
IGAEHVNNSYECDIPIGAGICASYQTQTNSPRRARSVASQSIIAYTMSLGAENSVAYSNNSIAIP
TNFTISVTTEILPVSMTKTSVDCTMYICGDSTECSNLLLQYGSFCTQLNRALTGIAVEQDKNTQE
VFAQVKQIYKTPPIKDFGGFNFSQILPDPSKPSKRSFIEDLLFNKVTLADAGFIKQYGDCLGDIA
ARDLICAQKFNGLTVLPPLLTDEMIAQYTSALLAGTITSGWTFGAGPALQIPFAMQMAYRFNGIG
VTQNVLYENQKLIANQFNSAIGKIQDSLSSTPSALGKLQDVVNQNAQALNTLVKQLSSNFGAISS
VLNDILSRLDPPEAEVQIDRLITGRLQSLQTYVTQQLIRAAEIRASANLAATKMSECVLGQSKRV
DFCGKGYHLMSFPQSAPHGVVFLHVTYVPAQEKNFTTAPAICHDGKAHFPREGVFVSNGTHWFVT
QRNFYEPQIITTDNTFVSGNCDVVIGIVNNTVYDPLQPELDSFKEELDKYFKNHTSPDVDLGDIS
GINASVVNIQKEIDRLNEVAKNLNESLIDLQELGKYEQYIKWPWYIWLGFIAGLIAIVMVTIMLC
CMTSCCSCLKGCCSCGSCCKFDEDDSEPVLKGVKLHYT
SEQ ID NO 351: SEQ ID NO 195 + A942P + A892P + N532P
MFVFLVLLPLVSSQCVNLTTRTQLPPAYTNSFTRGVYYPDKVFRSSVLHSTQDLFLPFFSNVTWF
HAIHVSGTNGTKRFDNPVLPFNDGVYFASTEKSNIIRGWIFGTTLDSKTQSLLIVNNATNVVIKV
CEFQFCNDPFLGVYYHKNNKSWMESEFRVYSSANNCTFEYVSQPFLMDLEGKQGNFKNLREFVFK
NIDGYFKIYSKHTPINLVRDLPQGFSALEPLVDLPIGINITRFQTLLALHRSYLTPGDSSSGWTA
GAAAYYVGYLQPRTFLLKYNENGTITDAVDCALDPLSETKCTLKSFTVEKGIYQTSNFRVQPTES
IVRFPNITNLCPFGEVFNATRFASVYAWNRKRISNCVADYSVLYNSASFSTFKCYGVSPTKLNDL
CFTNVYADSFVIRGDEVRQIAPGQTGKIADYNYKLPDDFTGCVIAWNSNNLDSKVGGNYNYLYRL
FRKSNLKPFERDISTEIYQAGSTPCNGVEGFNCYFPLQSYGFQPTNGVGYQPYRVVVLSFELLHA
PATVCGPKKSTPLVKNKCVNFNFNGLTGTGVLTESNKKFLPFQQFGRDIADTTDAVRDPQTLEIL
DITPCSFGGVSVITPGTNTSNQVAVLYQDVNCTEVPVAIHADQLTPTWRVYSTGSNVFQTRAGCL
IGAEHVNNSYECDIPIGAGICASYQTQTNSPRRARSVASQSIIAYTMSLGAENSVAYSNNSIAIP
TNFTISVTTEILPVSMTKTSVDCTMYICGDSTECSNLLLQYGSFCTQLNRALTGIAVEQDKNTQE
VFAQVKQIYKTPPIKDFGGFNFSQILPDPSKPSKRSFIEDLLFNKVTLADAGFIKQYGDCLGDIA
ARDLICAQKFNGLTVLPPLLTDEMIAQYTSALLAGTITSGWTFGAGPALQIPFAMQMAYRFNGIG
VTQNVLYENQKLIANQFNSAIGKIQDSLSSTPSALGKLQDVVNQNAQALNTLVKQLSSNFGAISS
VLNDILSRLDPPEAEVQIDRLITGRLQSLQTYVTQQLIRAAEIRASANLAATKMSECVLGQSKRV
DFCGKGYHLMSFPQSAPHGVVFLHVTYVPAQEKNFTTAPAICHDGKAHFPREGVFVSNGTHWFVT
QRNFYEPQIITTDNTFVSGNCDVVIGIVNNTVYDPLQPELDSFKEELDKYFKNHTSPDVDLGDIS
GINASVVNIQKEIDRLNEVAKNLNESLIDLQELGKYEQYIKWPWYIWLGFIAGLIAIVMVTIMLC
CMTSCCSCLKGCCSCGSCCKFDEDDSEPVLKGVKLHYT
SEQ ID NO 352: SEQ ID NO 195 + A942P + A892P + G880C + F888C
MFVFLVLLPLVSSQCVNLTTRTQLPPAYTNSFTRGVYYPDKVFRSSVLHSTQDLFLPFFSNVTWF
HAIHVSGTNGTKRFDNPVLPFNDGVYFASTEKSNIIRGWIFGTTLDSKTQSLLIVNNATNVVIKV
CEFQFCNDPFLGVYYHKNNKSWMESEFRVYSSANNCTFEYVSQPFLMDLEGKQGNFKNLREFVFK
NIDGYFKIYSKHTPINLVRDLPQGFSALEPLVDLPIGINITRFQTLLALHRSYLTPGDSSSGWTA
GAAAYYVGYLQPRTFLLKYNENGTITDAVDCALDPLSETKCTLKSFTVEKGIYQTSNFRVQPTES
IVRFPNITNLCPFGEVFNATRFASVYAWNRKRISNCVADYSVLYNSASFSTFKCYGVSPTKLNDL
CFTNVYADSFVIRGDEVRQIAPGQTGKIADYNYKLPDDFTGCVIAWNSNNLDSKVGGNYNYLYRL
FRKSNLKPFERDISTEIYQAGSTPCNGVEGFNCYFPLQSYGFQPTNGVGYQPYRVVVLSFELLHA
PATVCGPKKSTNLVKNKCVNFNFNGLTGTGVLTESNKKFLPFQQFGRDIADTTDAVRDPQTLEIL
DITPCSFGGVSVITPGTNTSNQVAVLYQDVNCTEVPVAIHADQLTPTWRVYSTGSNVFQTRAGCL
IGAEHVNNSYECDIPIGAGICASYQTQTNSPRRARSVASQSIIAYTMSLGAENSVAYSNNSIAIP
TNFTISVTTEILPVSMTKTSVDCTMYICGDSTECSNLLLQYGSFCTQLNRALTGIAVEQDKNTQE
VFAQVKQIYKTPPIKDFGGFNFSQILPDPSKPSKRSFIEDLLFNKVTLADAGFIKQYGDCLGDIA
ARDLICAQKFNGLTVLPPLLTDEMIAQYTSALLACTITSGWTCGAGPALQIPFAMQMAYRFNGIG
VTQNVLYENQKLIANQFNSAIGKIQDSLSSTPSALGKLQDVVNQNAQALNTLVKQLSSNFGAISS
VLNDILSRLDPPEAEVQIDRLITGRLQSLQTYVTQQLIRAAEIRASANLAATKMSECVLGQSKRV
DFCGKGYHLMSFPQSAPHGVVFLHVTYVPAQEKNFTTAPAICHDGKAHFPREGVFVSNGTHWFVT
QRNFYEPQIITTDNTFVSGNCDVVIGIVNNTVYDPLQPELDSFKEELDKYFKNHTSPDVDLGDIS
GINASVVNIQKEIDRLNEVAKNLNESLIDLQELGKYEQYIKWPWYIWLGFIAGLIAIVMVTIMLC
CMTSCCSCLKGCCSCGSCCKFDEDDSEPVLKGVKLHYT
SEQ ID NO 353: SEQ ID NO 195 + A942P + A892P + S884C + A893C
MFVFLVLLPLVSSQCVNLTTRTQLPPAYTNSFTRGVYYPDKVFRSSVLHSTQDLFLPFFSNVTWF
HAIHVSGTNGTKRFDNPVLPFNDGVYFASTEKSNIIRGWIFGTTLDSKTQSLLIVNNATNVVIKV
CEFQFCNDPFLGVYYHKNNKSWMESEFRVYSSANNCTFEYVSQPFLMDLEGKQGNFKNLREFVFK
NIDGYFKIYSKHTPINLVRDLPQGFSALEPLVDLPIGINITRFQTLLALHRSYLTPGDSSSGWTA
GAAAYYVGYLQPRTFLLKYNENGTITDAVDCALDPLSETKCTLKSFTVEKGIYQTSNFRVQPTES
IVRFPNITNLCPFGEVFNATRFASVYAWNRKRISNCVADYSVLYNSASFSTFKCYGVSPTKLNDL
CFTNVYADSFVIRGDEVRQIAPGQTGKIADYNYKLPDDFTGCVIAWNSNNLDSKVGGNYNYLYRL
FRKSNLKPFERDISTEIYQAGSTPCNGVEGFNCYFPLQSYGFQPTNGVGYQPYRVVVLSFELLHA
PATVCGPKKSTNLVKNKCVNFNFNGLTGTGVLTESNKKFLPFQQFGRDIADTTDAVRDPQTLEIL
DITPCSFGGVSVITPGTNTSNQVAVLYQDVNCTEVPVAIHADQLTPTWRVYSTGSNVFQTRAGCL
IGAEHVNNSYECDIPIGAGICASYQTQTNSPRRARSVASQSIIAYTMSLGAENSVAYSNNSIAIP
TNFTISVTTEILPVSMTKTSVDCTMYICGDSTECSNLLLQYGSFCTQLNRALTGIAVEQDKNTQE
VFAQVKQIYKTPPIKDFGGFNFSQILPDPSKPSKRSFIEDLLFNKVTLADAGFIKQYGDCLGDIA
ARDLICAQKFNGLTVLPPLLTDEMIAQYTSALLAGTITCGWTFGAGPCLQIPFAMQMAYRFNGIG
VTQNVLYENQKLIANQFNSAIGKIQDSLSSTPSALGKLQDVVNQNAQALNTLVKQLSSNFGAISS
VLNDILSRLDPPEAEVQIDRLITGRLQSLQTYVTQQLIRAAEIRASANLAATKMSECVLGQSKRV
DFCGKGYHLMSFPQSAPHGVVFLHVTYVPAQEKNFTTAPAICHDGKAHFPREGVFVSNGTHWFVT
QRNFYEPQIITTDNTFVSGNCDVVIGIVNNTVYDPLQPELDSFKEELDKYFKNHTSPDVDLGDIS
GINASVVNIQKEIDRLNEVAKNLNESLIDLQELGKYEQYIKWPWYIWLGFIAGLIAIVMVTIMLC
CMTSCCSCLKGCCSCGSCCKFDEDDSEPVLKGVKLHYT
SEQ ID NO 354: SEQ ID NO 195 + A942P + D614N + T572I
MFVFLVLLPLVSSQCVNLTTRTQLPPAYTNSFTRGVYYPDKVFRSSVLHSTQDLFLPFFSNVTWF
HAIHVSGTNGTKRFDNPVLPFNDGVYFASTEKSNIIRGWIFGTTLDSKTQSLLIVNNATNVVIKV
CEFQFCNDPFLGVYYHKNNKSWMESEFRVYSSANNCTFEYVSQPFLMDLEGKQGNFKNLREFVFK
NIDGYFKIYSKHTPINLVRDLPQGFSALEPLVDLPIGINITRFQTLLALHRSYLTPGDSSSGWTA
GAAAYYVGYLQPRTFLLKYNENGTITDAVDCALDPLSETKCTLKSFTVEKGIYQTSNFRVQPTES
IVRFPNITNLCPFGEVFNATRFASVYAWNRKRISNCVADYSVLYNSASFSTFKCYGVSPTKLNDL
CFTNVYADSFVIRGDEVRQIAPGQTGKIADYNYKLPDDFTGCVIAWNSNNLDSKVGGNYNYLYRL
FRKSNLKPFERDISTEIYQAGSTPCNGVEGFNCYFPLQSYGFQPTNGVGYQPYRVVVLSFELLHA
PATVCGPKKSTNLVKNKCVNFNFNGLTGTGVLTESNKKFLPFQQFGRDIADITDAVRDPQTLEIL
DITPCSFGGVSVITPGTNTSNQVAVLYQNVNCTEVPVAIHADQLTPTWRVYSTGSNVFQTRAGCL
IGAEHVNNSYECDIPIGAGICASYQTQTNSPRRARSVASQSIIAYTMSLGAENSVAYSNNSIAIP
TNFTISVTTEILPVSMTKTSVDCTMYICGDSTECSNLLLQYGSFCTQLNRALTGIAVEQDKNTQE
VFAQVKQIYKTPPIKDFGGFNFSQILPDPSKPSKRSFIEDLLFNKVTLADAGFIKQYGDCLGDIA
ARDLICAQKFNGLTVLPPLLTDEMIAQYTSALLAGTITSGWTFGAGAALQIPFAMQMAYRFNGIG
VTQNVLYENQKLIANQFNSAIGKIQDSLSSTPSALGKLQDVVNQNAQALNTLVKQLSSNFGAISS
VLNDILSRLDPPEAEVQIDRLITGRLQSLQTYVTQQLIRAAEIRASANLAATKMSECVLGQSKRV
DFCGKGYHLMSFPQSAPHGVVFLHVTYVPAQEKNFTTAPAICHDGKAHFPREGVFVSNGTHWFVT
QRNFYEPQIITTDNTFVSGNCDVVIGIVNNTVYDPLQPELDSFKEELDKYFKNHTSPDVDLGDIS
GINASVVNIQKEIDRLNEVAKNLNESLIDLQELGKYEQYIKWPWYIWLGFIAGLIAIVMVTIMLC
CMTSCCSCLKGCCSCGSCCKFDEDDSEPVLKGVKLHYT
SEQ ID NO 355: SEQ ID NO 195 + A942P + D614N + N532P
MFVFLVLLPLVSSQCVNLTTRTQLPPAYTNSFTRGVYYPDKVFRSSVLHSTQDLFLPFFSNVTWF
HAIHVSGTNGTKRFDNPVLPFNDGVYFASTEKSNIIRGWIFGTTLDSKTQSLLIVNNATNVVIKV
CEFQFCNDPFLGVYYHKNNKSWMESEFRVYSSANNCTFEYVSQPFLMDLEGKQGNFKNLREFVFK
NIDGYFKIYSKHTPINLVRDLPQGFSALEPLVDLPIGINITRFQTLLALHRSYLTPGDSSSGWTA
GAAAYYVGYLQPRTFLLKYNENGTITDAVDCALDPLSETKCTLKSFTVEKGIYQTSNFRVQPTES
IVRFPNITNLCPFGEVFNATRFASVYAWNRKRISNCVADYSVLYNSASFSTFKCYGVSPTKLNDL
CFTNVYADSFVIRGDEVRQIAPGQTGKIADYNYKLPDDFTGCVIAWNSNNLDSKVGGNYNYLYRL
FRKSNLKPFERDISTEIYQAGSTPCNGVEGFNCYFPLQSYGFQPTNGVGYQPYRVVVLSFELLHA
PATVCGPKKSTPLVKNKCVNFNFNGLTGTGVLTESNKKFLPFQQFGRDIADTTDAVRDPQTLEIL
DITPCSFGGVSVITPGTNTSNQVAVLYQNVNCTEVPVAIHADQLTPTWRVYSTGSNVFQTRAGCL
IGAEHVNNSYECDIPIGAGICASYQTQTNSPRRARSVASQSIIAYTMSLGAENSVAYSNNSIAIP
TNFTISVTTEILPVSMTKTSVDCTMYICGDSTECSNLLLQYGSFCTQLNRALTGIAVEQDKNTQE
VFAQVKQIYKTPPIKDFGGFNFSQILPDPSKPSKRSFIEDLLFNKVTLADAGFIKQYGDCLGDIA
ARDLICAQKFNGLTVLPPLLTDEMIAQYTSALLAGTITSGWTFGAGAALQIPFAMQMAYRFNGIG
VTQNVLYENQKLIANQFNSAIGKIQDSLSSTPSALGKLQDVVNQNAQALNTLVKQLSSNFGAISS
VLNDILSRLDPPEAEVQIDRLITGRLQSLQTYVTQQLIRAAEIRASANLAATKMSECVLGQSKRV
DFCGKGYHLMSFPQSAPHGVVFLHVTYVPAQEKNFTTAPAICHDGKAHFPREGVFVSNGTHWFVT
QRNFYEPQIITTDNTFVSGNCDVVIGIVNNTVYDPLQPELDSFKEELDKYFKNHTSPDVDLGDIS
GINASVVNIQKEIDRLNEVAKNLNESLIDLQELGKYEQYIKWPWYIWLGFIAGLIAIVMVTIMLC
CMTSCCSCLKGCCSCGSCCKFDEDDSEPVLKGVKLHYT
SEQ ID NO 356: SEQ ID NO 195 + A942P + D614N + G880C + F888C
MFVFLVLLPLVSSQCVNLTTRTQLPPAYTNSFTRGVYYPDKVFRSSVLHSTQDLFLPFFSNVTWF
HAIHVSGTNGTKRFDNPVLPFNDGVYFASTEKSNIIRGWIFGTTLDSKTQSLLIVNNATNVVIKV
CEFQFCNDPFLGVYYHKNNKSWMESEFRVYSSANNCTFEYVSQPFLMDLEGKQGNFKNLREFVFK
NIDGYFKIYSKHTPINLVRDLPQGFSALEPLVDLPIGINITRFQTLLALHRSYLTPGDSSSGWTA
GAAAYYVGYLQPRTFLLKYNENGTITDAVDCALDPLSETKCTLKSFTVEKGIYQTSNFRVQPTES
IVRFPNITNLCPFGEVFNATRFASVYAWNRKRISNCVADYSVLYNSASFSTFKCYGVSPTKLNDL
CFTNVYADSFVIRGDEVRQIAPGQTGKIADYNYKLPDDFTGCVIAWNSNNLDSKVGGNYNYLYRL
FRKSNLKPFERDISTEIYQAGSTPCNGVEGFNCYFPLQSYGFQPTNGVGYQPYRVVVLSFELLHA
PATVCGPKKSTNLVKNKCVNFNFNGLTGTGVLTESNKKFLPFQQFGRDIADTTDAVRDPQTLEIL
DITPCSFGGVSVITPGTNTSNQVAVLYQNVNCTEVPVAIHADQLTPTWRVYSTGSNVFQTRAGCL
IGAEHVNNSYECDIPIGAGICASYQTQTNSPRRARSVASQSIIAYTMSLGAENSVAYSNNSIAIP
TNFTISVTTEILPVSMTKTSVDCTMYICGDSTECSNLLLQYGSFCTQLNRALTGIAVEQDKNTQE
VFAQVKQIYKTPPIKDFGGFNFSQILPDPSKPSKRSFIEDLLFNKVTLADAGFIKQYGDCLGDIA
ARDLICAQKFNGLTVLPPLLTDEMIAQYTSALLACTITSGWTCGAGAALQIPFAMQMAYRFNGIG
VTQNVLYENQKLIANQFNSAIGKIQDSLSSTPSALGKLQDVVNQNAQALNTLVKQLSSNFGAISS
VLNDILSRLDPPEAEVQIDRLITGRLQSLQTYVTQQLIRAAEIRASANLAATKMSECVLGQSKRV
DFCGKGYHLMSFPQSAPHGVVFLHVTYVPAQEKNFTTAPAICHDGKAHFPREGVFVSNGTHWFVT
QRNFYEPQIITTDNTFVSGNCDVVIGIVNNTVYDPLQPELDSFKEELDKYFKNHTSPDVDLGDIS
GINASVVNIQKEIDRLNEVAKNLNESLIDLQELGKYEQYIKWPWYIWLGFIAGLIAIVMVTIMLC
CMTSCCSCLKGCCSCGSCCKFDEDDSEPVLKGVKLHYT
SEQ ID NO 357: SEQ ID NO 195 + A942P + D614N + S884C + A893C
MFVFLVLLPLVSSQCVNLTTRTQLPPAYTNSFTRGVYYPDKVFRSSVLHSTQDLFLPFFSNVTWF
HAIHVSGTNGTKRFDNPVLPFNDGVYFASTEKSNIIRGWIFGTTLDSKTQSLLIVNNATNVVIKV
CEFQFCNDPFLGVYYHKNNKSWMESEFRVYSSANNCTFEYVSQPFLMDLEGKQGNFKNLREFVFK
NIDGYFKIYSKHTPINLVRDLPQGFSALEPLVDLPIGINITRFQTLLALHRSYLTPGDSSSGWTA
GAAAYYVGYLQPRTFLLKYNENGTITDAVDCALDPLSETKCTLKSFTVEKGIYQTSNFRVQPTES
IVRFPNITNLCPFGEVFNATRFASVYAWNRKRISNCVADYSVLYNSASFSTFKCYGVSPTKLNDL
CFTNVYADSFVIRGDEVRQIAPGQTGKIADYNYKLPDDFTGCVIAWNSNNLDSKVGGNYNYLYRL
FRKSNLKPFERDISTEIYQAGSTPCNGVEGFNCYFPLQSYGFQPTNGVGYQPYRVVVLSFELLHA
PATVCGPKKSTNLVKNKCVNFNFNGLTGTGVLTESNKKFLPFQQFGRDIADTTDAVRDPQTLEIL
DITPCSFGGVSVITPGTNTSNQVAVLYQNVNCTEVPVAIHADQLTPTWRVYSTGSNVFQTRAGCL
IGAEHVNNSYECDIPIGAGICASYQTQTNSPRRARSVASQSIIAYTMSLGAENSVAYSNNSIAIP
TNFTISVTTEILPVSMTKTSVDCTMYICGDSTECSNLLLQYGSFCTQLNRALTGIAVEQDKNTQE
VFAQVKQIYKTPPIKDFGGFNFSQILPDPSKPSKRSFIEDLLFNKVTLADAGFIKQYGDCLGDIA
ARDLICAQKFNGLTVLPPLLTDEMIAQYTSALLAGTITCGWTFGAGACLQIPFAMQMAYRFNGIG
VTQNVLYENQKLIANQFNSAIGKIQDSLSSTPSALGKLQDVVNQNAQALNTLVKQLSSNFGAISS
VLNDILSRLDPPEAEVQIDRLITGRLQSLQTYVTQQLIRAAEIRASANLAATKMSECVLGQSKRV
DFCGKGYHLMSFPQSAPHGVVFLHVTYVPAQEKNFTTAPAICHDGKAHFPREGVFVSNGTHWFVT
QRNFYEPQIITTDNTFVSGNCDVVIGIVNNTVYDPLQPELDSFKEELDKYFKNHTSPDVDLGDIS
GINASVVNIQKEIDRLNEVAKNLNESLIDLQELGKYEQYIKWPWYIWLGFIAGLIAIVMVTIMLC
CMTSCCSCLKGCCSCGSCCKFDEDDSEPVLKGVKLHYT
SEQ ID NO 358: SEQ ID NO 195 + A942P + T572I +
N532P
MFVFLVLLPLVSSQCVNLTTRTQLPPAYTNSFTRGVYYPDKVFRSSVLHSTQDLFLPFFSNVTWF
HAIHVSGTNGTKRFDNPVLPFNDGVYFASTEKSNIIRGWIFGTTLDSKTQSLLIVNNATNVVIKV
CEFQFCNDPFLGVYYHKNNKSWMESEFRVYSSANNCTFEYVSQPFLMDLEGKQGNFKNLREFVFK
NIDGYFKIYSKHTPINLVRDLPQGFSALEPLVDLPIGINITRFQTLLALHRSYLTPGDSSSGWTA
GAAAYYVGYLQPRTFLLKYNENGTITDAVDCALDPLSETKCTLKSFTVEKGIYQTSNFRVQPTES
IVRFPNITNLCPFGEVFNATRFASVYAWNRKRISNCVADYSVLYNSASFSTFKCYGVSPTKLNDL
CFTNVYADSFVIRGDEVRQIAPGQTGKIADYNYKLPDDFTGCVIAWNSNNLDSKVGGNYNYLYRL
FRKSNLKPFERDISTEIYQAGSTPCNGVEGFNCYFPLQSYGFQPTNGVGYQPYRVVVLSFELLHA
PATVCGPKKSTPLVKNKCVNFNFNGLTGTGVLTESNKKFLPFQQFGRDIADITDAVRDPQTLEIL
DITPCSFGGVSVITPGTNTSNQVAVLYQDVNCTEVPVAIHADQLTPTWRVYSTGSNVFQTRAGCL
IGAEHVNNSYECDIPIGAGICASYQTQTNSPRRARSVASQSIIAYTMSLGAENSVAYSNNSIAIP
TNFTISVTTEILPVSMTKTSVDCTMYICGDSTECSNLLLQYGSFCTQLNRALTGIAVEQDKNTQE
VFAQVKQIYKTPPIKDFGGFNFSQILPDPSKPSKRSFIEDLLFNKVTLADAGFIKQYGDCLGDIA
ARDLICAQKFNGLTVLPPLLTDEMIAQYTSALLAGTITSGWTFGAGAALQIPFAMQMAYRFNGIG
VTQNVLYENQKLIANQFNSAIGKIQDSLSSTPSALGKLQDVVNQNAQALNTLVKQLSSNFGAISS
VLNDILSRLDPPEAEVQIDRLITGRLQSLQTYVTQQLIRAAEIRASANLAATKMSECVLGQSKRV
DFCGKGYHLMSFPQSAPHGVVFLHVTYVPAQEKNFTTAPAICHDGKAHFPREGVFVSNGTHWFVT
QRNFYEPQIITTDNTFVSGNCDVVIGIVNNTVYDPLQPELDSFKEELDKYFKNHTSPDVDLGDIS
GINASVVNIQKEIDRLNEVAKNLNESLIDLQELGKYEQYIKWPWYIWLGFIAGLIAIVMVTIMLC
CMTSCCSCLKGCCSCGSCCKFDEDDSEPVLKGVKLHYT
SEQ ID NO 359: SEQ ID NO 195 + A942P + T572I +
G880C + F888C
MFVFLVLLPLVSSQCVNLTTRTQLPPAYTNSFTRGVYYPDKVFRSSVLHSTQDLFLPFFSNVTWF
HAIHVSGTNGTKRFDNPVLPFNDGVYFASTEKSNIIRGWIFGTTLDSKTQSLLIVNNATNVVIKV
CEFQFCNDPFLGVYYHKNNKSWMESEFRVYSSANNCTFEYVSQPFLMDLEGKQGNFKNLREFVFK
NIDGYFKIYSKHTPINLVRDLPQGFSALEPLVDLPIGINITRFQTLLALHRSYLTPGDSSSGWTA
GAAAYYVGYLQPRTFLLKYNENGTITDAVDCALDPLSETKCTLKSFTVEKGIYQTSNFRVQPTES
IVRFPNITNLCPFGEVFNATRFASVYAWNRKRISNCVADYSVLYNSASFSTFKCYGVSPTKLNDL
CFTNVYADSFVIRGDEVRQIAPGQTGKIADYNYKLPDDFTGCVIAWNSNNLDSKVGGNYNYLYRL
FRKSNLKPFERDISTEIYQAGSTPCNGVEGFNCYFPLQSYGFQPTNGVGYQPYRVVVLSFELLHA
PATVCGPKKSTNLVKNKCVNFNFNGLTGTGVLTESNKKFLPFQQFGRDIADITDAVRDPQTLEIL
DITPCSFGGVSVITPGTNTSNQVAVLYQDVNCTEVPVAIHADQLTPTWRVYSTGSNVFQTRAGCL
IGAEHVNNSYECDIPIGAGICASYQTQTNSPRRARSVASQSIIAYTMSLGAENSVAYSNNSIAIP
TNFTISVTTEILPVSMTKTSVDCTMYICGDSTECSNLLLQYGSFCTQLNRALTGIAVEQDKNTQE
VFAQVKQIYKTPPIKDFGGFNFSQILPDPSKPSKRSFIEDLLFNKVTLADAGFIKQYGDCLGDIA
ARDLICAQKFNGLTVLPPLLTDEMIAQYTSALLACTITSGWTCGAGAALQIPFAMQMAYRFNGIG
VTQNVLYENQKLIANQFNSAIGKIQDSLSSTPSALGKLQDVVNQNAQALNTLVKQLSSNFGAISS
VLNDILSRLDPPEAEVQIDRLITGRLQSLQTYVTQQLIRAAEIRASANLAATKMSECVLGQSKRV
DFCGKGYHLMSFPQSAPHGVVFLHVTYVPAQEKNFTTAPAICHDGKAHFPREGVFVSNGTHWFVT
QRNFYEPQIITTDNTFVSGNCDVVIGIVNNTVYDPLQPELDSFKEELDKYFKNHTSPDVDLGDIS
GINASVVNIQKEIDRLNEVAKNLNESLIDLQELGKYEQYIKWPWYIWLGFIAGLIAIVMVTIMLC
CMTSCCSCLKGCCSCGSCCKFDEDDSEPVLKGVKLHYT
SEQ ID NO 360: SEQ ID NO 195 + A942P + T572I +
S884C + A893C
MFVFLVLLPLVSSQCVNLTTRTQLPPAYTNSFTRGVYYPDKVFRSSVLHSTQDLFLPFFSNVTWF
HAIHVSGTNGTKRFDNPVLPFNDGVYFASTEKSNIIRGWIFGTTLDSKTQSLLIVNNATNVVIKV
CEFQFCNDPFLGVYYHKNNKSWMESEFRVYSSANNCTFEYVSQPFLMDLEGKQGNFKNLREFVFK
NIDGYFKIYSKHTPINLVRDLPQGFSALEPLVDLPIGINITRFQTLLALHRSYLTPGDSSSGWTA
GAAAYYVGYLQPRTFLLKYNENGTITDAVDCALDPLSETKCTLKSFTVEKGIYQTSNFRVQPTES
IVRFPNITNLCPFGEVFNATRFASVYAWNRKRISNCVADYSVLYNSASFSTFKCYGVSPTKLNDL
CFTNVYADSFVIRGDEVRQIAPGQTGKIADYNYKLPDDFTGCVIAWNSNNLDSKVGGNYNYLYRL
FRKSNLKPFERDISTEIYQAGSTPCNGVEGFNCYFPLQSYGFQPTNGVGYQPYRVVVLSFELLHA
PATVCGPKKSTNLVKNKCVNFNFNGLTGTGVLTESNKKFLPFQQFGRDIADITDAVRDPQTLEIL
DITPCSFGGVSVITPGTNTSNQVAVLYQDVNCTEVPVAIHADQLTPTWRVYSTGSNVFQTRAGCL
IGAEHVNNSYECDIPIGAGICASYQTQTNSPRRARSVASQSIIAYTMSLGAENSVAYSNNSIAIP
TNFTISVTTEILPVSMTKTSVDCTMYICGDSTECSNLLLQYGSFCTQLNRALTGIAVEQDKNTQE
VFAQVKQIYKTPPIKDFGGFNFSQILPDPSKPSKRSFIEDLLFNKVTLADAGFIKQYGDCLGDIA
ARDLICAQKFNGLTVLPPLLTDEMIAQYTSALLAGTITCGWTFGAGACLQIPFAMQMAYRFNGIG
VTQNVLYENQKLIANQFNSAIGKIQDSLSSTPSALGKLQDVVNQNAQALNTLVKQLSSNFGAISS
VLNDILSRLDPPEAEVQIDRLITGRLQSLQTYVTQQLIRAAEIRASANLAATKMSECVLGQSKRV
DFCGKGYHLMSFPQSAPHGVVFLHVTYVPAQEKNFTTAPAICHDGKAHFPREGVFVSNGTHWFVT
QRNFYEPQIITTDNTFVSGNCDVVIGIVNNTVYDPLQPELDSFKEELDKYFKNHTSPDVDLGDIS
GINASVVNIQKEIDRLNEVAKNLNESLIDLQELGKYEQYIKWPWYIWLGFIAGLIAIVMVTIMLC
CMTSCCSCLKGCCSCGSCCKFDEDDSEPVLKGVKLHYT
SEQ ID NO 361: SEQ ID NO 195 + A942P + N532P + G880C + F888C
MFVFLVLLPLVSSQCVNLTTRTQLPPAYTNSFTRGVYYPDKVFRSSVLHSTQDLFLPFFSNVTWF
HAIHVSGTNGTKRFDNPVLPFNDGVYFASTEKSNIIRGWIFGTTLDSKTQSLLIVNNATNVVIKV
CEFQFCNDPFLGVYYHKNNKSWMESEFRVYSSANNCTFEYVSQPFLMDLEGKQGNFKNLREFVFK
NIDGYFKIYSKHTPINLVRDLPQGFSALEPLVDLPIGINITRFQTLLALHRSYLTPGDSSSGWTA
GAAAYYVGYLQPRTFLLKYNENGTITDAVDCALDPLSETKCTLKSFTVEKGIYQTSNFRVQPTES
IVRFPNITNLCPFGEVFNATRFASVYAWNRKRISNCVADYSVLYNSASFSTFKCYGVSPTKLNDL
CFTNVYADSFVIRGDEVRQIAPGQTGKIADYNYKLPDDFTGCVIAWNSNNLDSKVGGNYNYLYRL
FRKSNLKPFERDISTEIYQAGSTPCNGVEGFNCYFPLQSYGFQPTNGVGYQPYRVVVLSFELLHA
PATVCGPKKSTPLVKNKCVNFNFNGLTGTGVLTESNKKFLPFQQFGRDIADTTDAVRDPQTLEIL
DITPCSFGGVSVITPGTNTSNQVAVLYQDVNCTEVPVAIHADQLTPTWRVYSTGSNVFQTRAGCL
IGAEHVNNSYECDIPIGAGICASYQTQTNSPRRARSVASQSIIAYTMSLGAENSVAYSNNSIAIP
TNFTISVTTEILPVSMTKTSVDCTMYICGDSTECSNLLLQYGSFCTQLNRALTGIAVEQDKNTQE
VFAQVKQIYKTPPIKDFGGFNFSQILPDPSKPSKRSFIEDLLFNKVTLADAGFIKQYGDCLGDIA
ARDLICAQKFNGLTVLPPLLTDEMIAQYTSALLACTITSGWTCGAGAALQIPFAMQMAYRFNGIG
VTQNVLYENQKLIANQFNSAIGKIQDSLSSTPSALGKLQDVVNQNAQALNTLVKQLSSNFGAISS
VLNDILSRLDPPEAEVQIDRLITGRLQSLQTYVTQQLIRAAEIRASANLAATKMSECVLGQSKRV
DFCGKGYHLMSFPQSAPHGVVFLHVTYVPAQEKNFTTAPAICHDGKAHFPREGVFVSNGTHWFVT
QRNFYEPQIITTDNTFVSGNCDVVIGIVNNTVYDPLQPELDSFKEELDKYFKNHTSPDVDLGDIS
GINASVVNIQKEIDRLNEVAKNLNESLIDLQELGKYEQYIKWPWYIWLGFIAGLIAIVMVTIMLC
CMTSCCSCLKGCCSCGSCCKFDEDDSEPVLKGVKLHYT
SEQ ID NO 362: SEQ ID NO 195 + A942P + N532P + S884C + A893C
MFVFLVLLPLVSSQCVNLTTRTQLPPAYTNSFTRGVYYPDKVFRSSVLHSTQDLFLPFFSNVTWF
HAIHVSGTNGTKRFDNPVLPFNDGVYFASTEKSNIIRGWIFGTTLDSKTQSLLIVNNATNVVIKV
CEFQFCNDPFLGVYYHKNNKSWMESEFRVYSSANNCTFEYVSQPFLMDLEGKQGNFKNLREFVFK
NIDGYFKIYSKHTPINLVRDLPQGFSALEPLVDLPIGINITRFQTLLALHRSYLTPGDSSSGWTA
GAAAYYVGYLQPRTFLLKYNENGTITDAVDCALDPLSETKCTLKSFTVEKGIYQTSNFRVQPTES
IVRFPNITNLCPFGEVFNATRFASVYAWNRKRISNCVADYSVLYNSASFSTFKCYGVSPTKLNDL
CFTNVYADSFVIRGDEVRQIAPGQTGKIADYNYKLPDDFTGCVIAWNSNNLDSKVGGNYNYLYRL
FRKSNLKPFERDISTEIYQAGSTPCNGVEGFNCYFPLQSYGFQPTNGVGYQPYRVVVLSFELLHA
PATVCGPKKSTPLVKNKCVNFNFNGLTGTGVLTESNKKFLPFQQFGRDIADTTDAVRDPQTLEIL
DITPCSFGGVSVITPGTNTSNQVAVLYQDVNCTEVPVAIHADQLTPTWRVYSTGSNVFQTRAGCL
IGAEHVNNSYECDIPIGAGICASYQTQTNSPRRARSVASQSIIAYTMSLGAENSVAYSNNSIAIP
TNFTISVTTEILPVSMTKTSVDCTMYICGDSTECSNLLLQYGSFCTQLNRALTGIAVEQDKNTQE
VFAQVKQIYKTPPIKDFGGFNFSQILPDPSKPSKRSFIEDLLFNKVTLADAGFIKQYGDCLGDIA
ARDLICAQKFNGLTVLPPLLTDEMIAQYTSALLAGTITCGWTFGAGACLQIPFAMQMAYRFNGIG
VTQNVLYENQKLIANQFNSAIGKIQDSLSSTPSALGKLQDVVNQNAQALNTLVKQLSSNFGAISS
VLNDILSRLDPPEAEVQIDRLITGRLQSLQTYVTQQLIRAAEIRASANLAATKMSECVLGQSKRV
DFCGKGYHLMSFPQSAPHGVVFLHVTYVPAQEKNFTTAPAICHDGKAHFPREGVFVSNGTHWFVT
QRNFYEPQIITTDNTFVSGNCDVVIGIVNNTVYDPLQPELDSFKEELDKYFKNHTSPDVDLGDIS
GINASVVNIQKEIDRLNEVAKNLNESLIDLQELGKYEQYIKWPWYIWLGFIAGLIAIVMVTIMLC
CMTSCCSCLKGCCSCGSCCKFDEDDSEPVLKGVKLHYT
SEQ ID NO 363: SEQ ID NO 195 + A892P + D614N + T572I
MFVFLVLLPLVSSQCVNLTTRTQLPPAYTNSFTRGVYYPDKVFRSSVLHSTQDLFLPFFSNVTWF
HAIHVSGTNGTKRFDNPVLPFNDGVYFASTEKSNIIRGWIFGTTLDSKTQSLLIVNNATNVVIKV
CEFQFCNDPFLGVYYHKNNKSWMESEFRVYSSANNCTFEYVSQPFLMDLEGKQGNFKNLREFVFK
NIDGYFKIYSKHTPINLVRDLPQGFSALEPLVDLPIGINITRFQTLLALHRSYLTPGDSSSGWTA
GAAAYYVGYLQPRTFLLKYNENGTITDAVDCALDPLSETKCTLKSFTVEKGIYQTSNFRVQPTES
IVRFPNITNLCPFGEVFNATRFASVYAWNRKRISNCVADYSVLYNSASFSTFKCYGVSPTKLNDL
CFTNVYADSFVIRGDEVRQIAPGQTGKIADYNYKLPDDFTGCVIAWNSNNLDSKVGGNYNYLYRL
FRKSNLKPFERDISTEIYQAGSTPCNGVEGFNCYFPLQSYGFQPTNGVGYQPYRVVVLSFELLHA
PATVCGPKKSTNLVKNKCVNFNFNGLTGTGVLTESNKKFLPFQQFGRDIADITDAVRDPQTLEIL
DITPCSFGGVSVITPGTNTSNQVAVLYQNVNCTEVPVAIHADQLTPTWRVYSTGSNVFQTRAGCL
IGAEHVNNSYECDIPIGAGICASYQTQTNSPRRARSVASQSIIAYTMSLGAENSVAYSNNSIAIP
TNFTISVTTEILPVSMTKTSVDCTMYICGDSTECSNLLLQYGSFCTQLNRALTGIAVEQDKNTQE
VFAQVKQIYKTPPIKDFGGFNFSQILPDPSKPSKRSFIEDLLFNKVTLADAGFIKQYGDCLGDIA
ARDLICAQKFNGLTVLPPLLTDEMIAQYTSALLAGTITSGWTFGAGPALQIPFAMQMAYRFNGIG
VTQNVLYENQKLIANQFNSAIGKIQDSLSSTASALGKLQDVVNQNAQALNTLVKQLSSNFGAISS
VLNDILSRLDPPEAEVQIDRLITGRLQSLQTYVTQQLIRAAEIRASANLAATKMSECVLGQSKRV
DFCGKGYHLMSFPQSAPHGVVFLHVTYVPAQEKNFTTAPAICHDGKAHFPREGVFVSNGTHWFVT
QRNFYEPQIITTDNTFVSGNCDVVIGIVNNTVYDPLQPELDSFKEELDKYFKNHTSPDVDLGDIS
GINASVVNIQKEIDRLNEVAKNLNESLIDLQELGKYEQYIKWPWYIWLGFIAGLIAIVMVTIMLC
CMTSCCSCLKGCCSCGSCCKFDEDDSEPVLKGVKLHYT
SEQ ID NO 364: SEQ ID NO 195 + A892P + D614N + N532P
MFVFLVLLPLVSSQCVNLTTRTQLPPAYTNSFTRGVYYPDKVFRSSVLHSTQDLFLPFFSNVTWF
HAIHVSGTNGTKRFDNPVLPFNDGVYFASTEKSNIIRGWIFGTTLDSKTQSLLIVNNATNVVIKV
CEFQFCNDPFLGVYYHKNNKSWMESEFRVYSSANNCTFEYVSQPFLMDLEGKQGNFKNLREFVFK
NIDGYFKIYSKHTPINLVRDLPQGFSALEPLVDLPIGINITRFQTLLALHRSYLTPGDSSSGWTA
GAAAYYVGYLQPRTFLLKYNENGTITDAVDCALDPLSETKCTLKSFTVEKGIYQTSNFRVQPTES
IVRFPNITNLCPFGEVFNATRFASVYAWNRKRISNCVADYSVLYNSASFSTFKCYGVSPTKLNDL
CFTNVYADSFVIRGDEVRQIAPGQTGKIADYNYKLPDDFTGCVIAWNSNNLDSKVGGNYNYLYRL
FRKSNLKPFERDISTEIYQAGSTPCNGVEGFNCYFPLQSYGFQPTNGVGYQPYRVVVLSFELLHA
PATVCGPKKSTPLVKNKCVNFNFNGLTGTGVLTESNKKFLPFQQFGRDIADTTDAVRDPQTLEIL
DITPCSFGGVSVITPGTNTSNQVAVLYQNVNCTEVPVAIHADQLTPTWRVYSTGSNVFQTRAGCL
IGAEHVNNSYECDIPIGAGICASYQTQTNSPRRARSVASQSIIAYTMSLGAENSVAYSNNSIAIP
TNFTISVTTEILPVSMTKTSVDCTMYICGDSTECSNLLLQYGSFCTQLNRALTGIAVEQDKNTQE
VFAQVKQIYKTPPIKDFGGFNFSQILPDPSKPSKRSFIEDLLFNKVTLADAGFIKQYGDCLGDIA
ARDLICAQKFNGLTVLPPLLTDEMIAQYTSALLAGTITSGWTFGAGPALQIPFAMQMAYRFNGIG
VTQNVLYENQKLIANQFNSAIGKIQDSLSSTASALGKLQDVVNQNAQALNTLVKQLSSNFGAISS
VLNDILSRLDPPEAEVQIDRLITGRLQSLQTYVTQQLIRAAEIRASANLAATKMSECVLGQSKRV
DFCGKGYHLMSFPQSAPHGVVFLHVTYVPAQEKNFTTAPAICHDGKAHFPREGVFVSNGTHWFVT
QRNFYEPQIITTDNTFVSGNCDVVIGIVNNTVYDPLQPELDSFKEELDKYFKNHTSPDVDLGDIS
GINASVVNIQKEIDRLNEVAKNLNESLIDLQELGKYEQYIKWPWYIWLGFIAGLIAIVMVTIMLC
CMTSCCSCLKGCCSCGSCCKFDEDDSEPVLKGVKLHYT
SEQ ID NO 365: SEQ ID NO 195 + A892P + D614N + G880C + F888C
MFVFLVLLPLVSSQCVNLTTRTQLPPAYTNSFTRGVYYPDKVFRSSVLHSTQDLFLPFFSNVTWF
HAIHVSGTNGTKRFDNPVLPFNDGVYFASTEKSNIIRGWIFGTTLDSKTQSLLIVNNATNVVIKV
CEFQFCNDPFLGVYYHKNNKSWMESEFRVYSSANNCTFEYVSQPFLMDLEGKQGNFKNLREFVFK
NIDGYFKIYSKHTPINLVRDLPQGFSALEPLVDLPIGINITRFQTLLALHRSYLTPGDSSSGWTA
GAAAYYVGYLQPRTFLLKYNENGTITDAVDCALDPLSETKCTLKSFTVEKGIYQTSNFRVQPTES
IVRFPNITNLCPFGEVFNATRFASVYAWNRKRISNCVADYSVLYNSASFSTFKCYGVSPTKLNDL
CFTNVYADSFVIRGDEVRQIAPGQTGKIADYNYKLPDDFTGCVIAWNSNNLDSKVGGNYNYLYRL
FRKSNLKPFERDISTEIYQAGSTPCNGVEGFNCYFPLQSYGFQPTNGVGYQPYRVVVLSFELLHA
PATVCGPKKSTNLVKNKCVNFNFNGLTGTGVLTESNKKFLPFQQFGRDIADTTDAVRDPQTLEIL
DITPCSFGGVSVITPGTNTSNQVAVLYQNVNCTEVPVAIHADQLTPTWRVYSTGSNVFQTRAGCL
IGAEHVNNSYECDIPIGAGICASYQTQTNSPRRARSVASQSIIAYTMSLGAENSVAYSNNSIAIP
TNFTISVTTEILPVSMTKTSVDCTMYICGDSTECSNLLLQYGSFCTQLNRALTGIAVEQDKNTQE
VFAQVKQIYKTPPIKDFGGFNFSQILPDPSKPSKRSFIEDLLFNKVTLADAGFIKQYGDCLGDIA
ARDLICAQKFNGLTVLPPLLTDEMIAQYTSALLACTITSGWTCGAGPALQIPFAMQMAYRFNGIG
VTQNVLYENQKLIANQFNSAIGKIQDSLSSTASALGKLQDVVNQNAQALNTLVKQLSSNFGAISS
VLNDILSRLDPPEAEVQIDRLITGRLQSLQTYVTQQLIRAAEIRASANLAATKMSECVLGQSKRV
DFCGKGYHLMSFPQSAPHGVVFLHVTYVPAQEKNFTTAPAICHDGKAHFPREGVFVSNGTHWFVT
QRNFYEPQIITTDNTFVSGNCDVVIGIVNNTVYDPLQPELDSFKEELDKYFKNHTSPDVDLGDIS
GINASVVNIQKEIDRLNEVAKNLNESLIDLQELGKYEQYIKWPWYIWLGFIAGLIAIVMVTIMLC
CMTSCCSCLKGCCSCGSCCKFDEDDSEPVLKGVKLHYT
SEQ ID NO 366: SEQ ID NO 195 + A892P + D614N + S884C + A893C
MFVFLVLLPLVSSQCVNLTTRTQLPPAYTNSFTRGVYYPDKVFRSSVLHSTQDLFLPFFSNVTWF
HAIHVSGTNGTKRFDNPVLPFNDGVYFASTEKSNIIRGWIFGTTLDSKTQSLLIVNNATNVVIKV
CEFQFCNDPFLGVYYHKNNKSWMESEFRVYSSANNCTFEYVSQPFLMDLEGKQGNFKNLREFVFK
NIDGYFKIYSKHTPINLVRDLPQGFSALEPLVDLPIGINITRFQTLLALHRSYLTPGDSSSGWTA
GAAAYYVGYLQPRTFLLKYNENGTITDAVDCALDPLSETKCTLKSFTVEKGIYQTSNFRVQPTES
IVRFPNITNLCPFGEVFNATRFASVYAWNRKRISNCVADYSVLYNSASFSTFKCYGVSPTKLNDL
CFTNVYADSFVIRGDEVRQIAPGQTGKIADYNYKLPDDFTGCVIAWNSNNLDSKVGGNYNYLYRL
FRKSNLKPFERDISTEIYQAGSTPCNGVEGFNCYFPLQSYGFQPTNGVGYQPYRVVVLSFELLHA
PATVCGPKKSTNLVKNKCVNFNFNGLTGTGVLTESNKKFLPFQQFGRDIADTTDAVRDPQTLEIL
DITPCSFGGVSVITPGTNTSNQVAVLYQNVNCTEVPVAIHADQLTPTWRVYSTGSNVFQTRAGCL
IGAEHVNNSYECDIPIGAGICASYQTQTNSPRRARSVASQSIIAYTMSLGAENSVAYSNNSIAIP
TNFTISVTTEILPVSMTKTSVDCTMYICGDSTECSNLLLQYGSFCTQLNRALTGIAVEQDKNTQE
VFAQVKQIYKTPPIKDFGGFNFSQILPDPSKPSKRSFIEDLLFNKVTLADAGFIKQYGDCLGDIA
ARDLICAQKFNGLTVLPPLLTDEMIAQYTSALLAGTITCGWTFGAGPCLQIPFAMQMAYRFNGIG
VTQNVLYENQKLIANQFNSAIGKIQDSLSSTASALGKLQDVVNQNAQALNTLVKQLSSNFGAISS
VLNDILSRLDPPEAEVQIDRLITGRLQSLQTYVTQQLIRAAEIRASANLAATKMSECVLGQSKRV
DFCGKGYHLMSFPQSAPHGVVFLHVTYVPAQEKNFTTAPAICHDGKAHFPREGVFVSNGTHWFVT
QRNFYEPQIITTDNTFVSGNCDVVIGIVNNTVYDPLQPELDSFKEELDKYFKNHTSPDVDLGDIS
GINASVVNIQKEIDRLNEVAKNLNESLIDLQELGKYEQYIKWPWYIWLGFIAGLIAIVMVTIMLC
CMTSCCSCLKGCCSCGSCCKFDEDDSEPVLKGVKLHYT
SEQ ID NO 367: SEQ ID NO 195 + A892P + T572I +
N532P
MFVFLVLLPLVSSQCVNLTTRTQLPPAYTNSFTRGVYYPDKVFRSSVLHSTQDLFLPFFSNVTWF
HAIHVSGTNGTKRFDNPVLPFNDGVYFASTEKSNIIRGWIFGTTLDSKTQSLLIVNNATNVVIKV
CEFQFCNDPFLGVYYHKNNKSWMESEFRVYSSANNCTFEYVSQPFLMDLEGKQGNFKNLREFVFK
NIDGYFKIYSKHTPINLVRDLPQGFSALEPLVDLPIGINITRFQTLLALHRSYLTPGDSSSGWTA
GAAAYYVGYLQPRTFLLKYNENGTITDAVDCALDPLSETKCTLKSFTVEKGIYQTSNFRVQPTES
IVRFPNITNLCPFGEVFNATRFASVYAWNRKRISNCVADYSVLYNSASFSTFKCYGVSPTKLNDL
CFTNVYADSFVIRGDEVRQIAPGQTGKIADYNYKLPDDFTGCVIAWNSNNLDSKVGGNYNYLYRL
FRKSNLKPFERDISTEIYQAGSTPCNGVEGFNCYFPLQSYGFQPTNGVGYQPYRVVVLSFELLHA
PATVCGPKKSTPLVKNKCVNFNFNGLTGTGVLTESNKKFLPFQQFGRDIADITDAVRDPQTLEIL
DITPCSFGGVSVITPGTNTSNQVAVLYQDVNCTEVPVAIHADQLTPTWRVYSTGSNVFQTRAGCL
IGAEHVNNSYECDIPIGAGICASYQTQTNSPRRARSVASQSIIAYTMSLGAENSVAYSNNSIAIP
TNFTISVTTEILPVSMTKTSVDCTMYICGDSTECSNLLLQYGSFCTQLNRALTGIAVEQDKNTQE
VFAQVKQIYKTPPIKDFGGFNFSQILPDPSKPSKRSFIEDLLFNKVTLADAGFIKQYGDCLGDIA
ARDLICAQKFNGLTVLPPLLTDEMIAQYTSALLAGTITSGWTFGAGPALQIPFAMQMAYRFNGIG
VTQNVLYENQKLIANQFNSAIGKIQDSLSSTASALGKLQDVVNQNAQALNTLVKQLSSNFGAISS
VLNDILSRLDPPEAEVQIDRLITGRLQSLQTYVTQQLIRAAEIRASANLAATKMSECVLGQSKRV
DFCGKGYHLMSFPQSAPHGVVFLHVTYVPAQEKNFTTAPAICHDGKAHFPREGVFVSNGTHWFVT
QRNFYEPQIITTDNTFVSGNCDVVIGIVNNTVYDPLQPELDSFKEELDKYFKNHTSPDVDLGDIS
GINASVVNIQKEIDRLNEVAKNLNESLIDLQELGKYEQYIKWPWYIWLGFIAGLIAIVMVTIMLC
CMTSCCSCLKGCCSCGSCCKFDEDDSEPVLKGVKLHYT
SEQ ID NO 368: SEQ ID NO 195 + A892P + T572I +
G880C + F888C
MFVFLVLLPLVSSQCVNLTTRTQLPPAYTNSFTRGVYYPDKVFRSSVLHSTQDLFLPFFSNVTWF
HAIHVSGTNGTKRFDNPVLPFNDGVYFASTEKSNIIRGWIFGTTLDSKTQSLLIVNNATNVVIKV
CEFQFCNDPFLGVYYHKNNKSWMESEFRVYSSANNCTFEYVSQPFLMDLEGKQGNFKNLREFVFK
NIDGYFKIYSKHTPINLVRDLPQGFSALEPLVDLPIGINITRFQTLLALHRSYLTPGDSSSGWTA
GAAAYYVGYLQPRTFLLKYNENGTITDAVDCALDPLSETKCTLKSFTVEKGIYQTSNFRVQPTES
IVRFPNITNLCPFGEVFNATRFASVYAWNRKRISNCVADYSVLYNSASFSTFKCYGVSPTKLNDL
CFTNVYADSFVIRGDEVRQIAPGQTGKIADYNYKLPDDFTGCVIAWNSNNLDSKVGGNYNYLYRL
FRKSNLKPFERDISTEIYQAGSTPCNGVEGFNCYFPLQSYGFQPTNGVGYQPYRVVVLSFELLHA
PATVCGPKKSTNLVKNKCVNFNFNGLTGTGVLTESNKKFLPFQQFGRDIADITDAVRDPQTLEIL
DITPCSFGGVSVITPGTNTSNQVAVLYQDVNCTEVPVAIHADQLTPTWRVYSTGSNVFQTRAGCL
IGAEHVNNSYECDIPIGAGICASYQTQTNSPRRARSVASQSIIAYTMSLGAENSVAYSNNSIAIP
TNFTISVTTEILPVSMTKTSVDCTMYICGDSTECSNLLLQYGSFCTQLNRALTGIAVEQDKNTQE
VFAQVKQIYKTPPIKDFGGFNFSQILPDPSKPSKRSFIEDLLFNKVTLADAGFIKQYGDCLGDIA
ARDLICAQKFNGLTVLPPLLTDEMIAQYTSALLACTITSGWTCGAGPALQIPFAMQMAYRFNGIG
VTQNVLYENQKLIANQFNSAIGKIQDSLSSTASALGKLQDVVNQNAQALNTLVKQLSSNFGAISS
VLNDILSRLDPPEAEVQIDRLITGRLQSLQTYVTQQLIRAAEIRASANLAATKMSECVLGQSKRV
DFCGKGYHLMSFPQSAPHGVVFLHVTYVPAQEKNFTTAPAICHDGKAHFPREGVFVSNGTHWFVT
QRNFYEPQIITTDNTFVSGNCDVVIGIVNNTVYDPLQPELDSFKEELDKYFKNHTSPDVDLGDIS
GINASVVNIQKEIDRLNEVAKNLNESLIDLQELGKYEQYIKWPWYIWLGFIAGLIAIVMVTIMLC
CMTSCCSCLKGCCSCGSCCKFDEDDSEPVLKGVKLHYT
SEQ ID NO 369: SEQ ID NO 195 + A892P + T572I +
S884C + A893C
MFVFLVLLPLVSSQCVNLTTRTQLPPAYTNSFTRGVYYPDKVFRSSVLHSTQDLFLPFFSNVTWF
HAIHVSGTNGTKRFDNPVLPFNDGVYFASTEKSNIIRGWIFGTTLDSKTQSLLIVNNATNVVIKV
CEFQFCNDPFLGVYYHKNNKSWMESEFRVYSSANNCTFEYVSQPFLMDLEGKQGNFKNLREFVFK
NIDGYFKIYSKHTPINLVRDLPQGFSALEPLVDLPIGINITRFQTLLALHRSYLTPGDSSSGWTA
GAAAYYVGYLQPRTFLLKYNENGTITDAVDCALDPLSETKCTLKSFTVEKGIYQTSNFRVQPTES
IVRFPNITNLCPFGEVFNATRFASVYAWNRKRISNCVADYSVLYNSASFSTFKCYGVSPTKLNDL
CFTNVYADSFVIRGDEVRQIAPGQTGKIADYNYKLPDDFTGCVIAWNSNNLDSKVGGNYNYLYRL
FRKSNLKPFERDISTEIYQAGSTPCNGVEGFNCYFPLQSYGFQPTNGVGYQPYRVVVLSFELLHA
PATVCGPKKSTNLVKNKCVNFNFNGLTGTGVLTESNKKFLPFQQFGRDIADITDAVRDPQTLEIL
DITPCSFGGVSVITPGTNTSNQVAVLYQDVNCTEVPVAIHADQLTPTWRVYSTGSNVFQTRAGCL
IGAEHVNNSYECDIPIGAGICASYQTQTNSPRRARSVASQSIIAYTMSLGAENSVAYSNNSIAIP
TNFTISVTTEILPVSMTKTSVDCTMYICGDSTECSNLLLQYGSFCTQLNRALTGIAVEQDKNTQE
VFAQVKQIYKTPPIKDFGGFNFSQILPDPSKPSKRSFIEDLLFNKVTLADAGFIKQYGDCLGDIA
ARDLICAQKFNGLTVLPPLLTDEMIAQYTSALLAGTITCGWTFGAGPCLQIPFAMQMAYRFNGIG
VTQNVLYENQKLIANQFNSAIGKIQDSLSSTASALGKLQDVVNQNAQALNTLVKQLSSNFGAISS
VLNDILSRLDPPEAEVQIDRLITGRLQSLQTYVTQQLIRAAEIRASANLAATKMSECVLGQSKRV
DFCGKGYHLMSFPQSAPHGVVFLHVTYVPAQEKNFTTAPAICHDGKAHFPREGVFVSNGTHWFVT
QRNFYEPQIITTDNTFVSGNCDVVIGIVNNTVYDPLQPELDSFKEELDKYFKNHTSPDVDLGDIS
GINASVVNIQKEIDRLNEVAKNLNESLIDLQELGKYEQYIKWPWYIWLGFIAGLIAIVMVTIMLC
CMTSCCSCLKGCCSCGSCCKFDEDDSEPVLKGVKLHYT
SEQ ID NO 370: SEQ ID NO 195 + A892P + N532P + G880C + F888C
MFVFLVLLPLVSSQCVNLTTRTQLPPAYTNSFTRGVYYPDKVFRSSVLHSTQDLFLPFFSNVTWF
HAIHVSGTNGTKRFDNPVLPFNDGVYFASTEKSNIIRGWIFGTTLDSKTQSLLIVNNATNVVIKV
CEFQFCNDPFLGVYYHKNNKSWMESEFRVYSSANNCTFEYVSQPFLMDLEGKQGNFKNLREFVFK
NIDGYFKIYSKHTPINLVRDLPQGFSALEPLVDLPIGINITRFQTLLALHRSYLTPGDSSSGWTA
GAAAYYVGYLQPRTFLLKYNENGTITDAVDCALDPLSETKCTLKSFTVEKGIYQTSNFRVQPTES
IVRFPNITNLCPFGEVFNATRFASVYAWNRKRISNCVADYSVLYNSASFSTFKCYGVSPTKLNDL
CFTNVYADSFVIRGDEVRQIAPGQTGKIADYNYKLPDDFTGCVIAWNSNNLDSKVGGNYNYLYRL
FRKSNLKPFERDISTEIYQAGSTPCNGVEGFNCYFPLQSYGFQPTNGVGYQPYRVVVLSFELLHA
PATVCGPKKSTPLVKNKCVNFNFNGLTGTGVLTESNKKFLPFQQFGRDIADTTDAVRDPQTLEIL
DITPCSFGGVSVITPGTNTSNQVAVLYQDVNCTEVPVAIHADQLTPTWRVYSTGSNVFQTRAGCL
IGAEHVNNSYECDIPIGAGICASYQTQTNSPRRARSVASQSIIAYTMSLGAENSVAYSNNSIAIP
TNFTISVTTEILPVSMTKTSVDCTMYICGDSTECSNLLLQYGSFCTQLNRALTGIAVEQDKNTQE
VFAQVKQIYKTPPIKDFGGFNFSQILPDPSKPSKRSFIEDLLFNKVTLADAGFIKQYGDCLGDIA
ARDLICAQKFNGLTVLPPLLTDEMIAQYTSALLACTITSGWTCGAGPALQIPFAMQMAYRFNGIG
VTQNVLYENQKLIANQFNSAIGKIQDSLSSTASALGKLQDVVNQNAQALNTLVKQLSSNFGAISS
VLNDILSRLDPPEAEVQIDRLITGRLQSLQTYVTQQLIRAAEIRASANLAATKMSECVLGQSKRV
DFCGKGYHLMSFPQSAPHGVVFLHVTYVPAQEKNFTTAPAICHDGKAHFPREGVFVSNGTHWFVT
QRNFYEPQIITTDNTFVSGNCDVVIGIVNNTVYDPLQPELDSFKEELDKYFKNHTSPDVDLGDIS
GINASVVNIQKEIDRLNEVAKNLNESLIDLQELGKYEQYIKWPWYIWLGFIAGLIAIVMVTIMLC
CMTSCCSCLKGCCSCGSCCKFDEDDSEPVLKGVKLHYT
SEQ ID NO 371: SEQ ID NO 195 + A892P + N532P + S884C + A893C
MFVFLVLLPLVSSQCVNLTTRTQLPPAYTNSFTRGVYYPDKVFRSSVLHSTQDLFLPFFSNVTWF
HAIHVSGTNGTKRFDNPVLPFNDGVYFASTEKSNIIRGWIFGTTLDSKTQSLLIVNNATNVVIKV
CEFQFCNDPFLGVYYHKNNKSWMESEFRVYSSANNCTFEYVSQPFLMDLEGKQGNFKNLREFVFK
NIDGYFKIYSKHTPINLVRDLPQGFSALEPLVDLPIGINITRFQTLLALHRSYLTPGDSSSGWTA
GAAAYYVGYLQPRTFLLKYNENGTITDAVDCALDPLSETKCTLKSFTVEKGIYQTSNFRVQPTES
IVRFPNITNLCPFGEVFNATRFASVYAWNRKRISNCVADYSVLYNSASFSTFKCYGVSPTKLNDL
CFTNVYADSFVIRGDEVRQIAPGQTGKIADYNYKLPDDFTGCVIAWNSNNLDSKVGGNYNYLYRL
FRKSNLKPFERDISTEIYQAGSTPCNGVEGFNCYFPLQSYGFQPTNGVGYQPYRVVVLSFELLHA
PATVCGPKKSTPLVKNKCVNFNFNGLTGTGVLTESNKKFLPFQQFGRDIADTTDAVRDPQTLEIL
DITPCSFGGVSVITPGTNTSNQVAVLYQDVNCTEVPVAIHADQLTPTWRVYSTGSNVFQTRAGCL
IGAEHVNNSYECDIPIGAGICASYQTQTNSPRRARSVASQSIIAYTMSLGAENSVAYSNNSIAIP
TNFTISVTTEILPVSMTKTSVDCTMYICGDSTECSNLLLQYGSFCTQLNRALTGIAVEQDKNTQE
VFAQVKQIYKTPPIKDFGGFNFSQILPDPSKPSKRSFIEDLLFNKVTLADAGFIKQYGDCLGDIA
ARDLICAQKFNGLTVLPPLLTDEMIAQYTSALLAGTITCGWTFGAGPCLQIPFAMQMAYRFNGIG
VTQNVLYENQKLIANQFNSAIGKIQDSLSSTASALGKLQDVVNQNAQALNTLVKQLSSNFGAISS
VLNDILSRLDPPEAEVQIDRLITGRLQSLQTYVTQQLIRAAEIRASANLAATKMSECVLGQSKRV
DFCGKGYHLMSFPQSAPHGVVFLHVTYVPAQEKNFTTAPAICHDGKAHFPREGVFVSNGTHWFVT
QRNFYEPQIITTDNTFVSGNCDVVIGIVNNTVYDPLQPELDSFKEELDKYFKNHTSPDVDLGDIS
GINASVVNIQKEIDRLNEVAKNLNESLIDLQELGKYEQYIKWPWYIWLGFIAGLIAIVMVTIMLC
CMTSCCSCLKGCCSCGSCCKFDEDDSEPVLKGVKLHYT
SEQ ID NO 372: SEQ ID NO 195 + D614N + T572I +
N532P
MFVFLVLLPLVSSQCVNLTTRTQLPPAYTNSFTRGVYYPDKVFRSSVLHSTQDLFLPFFSNVTWF
HAIHVSGTNGTKRFDNPVLPFNDGVYFASTEKSNIIRGWIFGTTLDSKTQSLLIVNNATNVVIKV
CEFQFCNDPFLGVYYHKNNKSWMESEFRVYSSANNCTFEYVSQPFLMDLEGKQGNFKNLREFVFK
NIDGYFKIYSKHTPINLVRDLPQGFSALEPLVDLPIGINITRFQTLLALHRSYLTPGDSSSGWTA
GAAAYYVGYLQPRTFLLKYNENGTITDAVDCALDPLSETKCTLKSFTVEKGIYQTSNFRVQPTES
IVRFPNITNLCPFGEVFNATRFASVYAWNRKRISNCVADYSVLYNSASFSTFKCYGVSPTKLNDL
CFTNVYADSFVIRGDEVRQIAPGQTGKIADYNYKLPDDFTGCVIAWNSNNLDSKVGGNYNYLYRL
FRKSNLKPFERDISTEIYQAGSTPCNGVEGFNCYFPLQSYGFQPTNGVGYQPYRVVVLSFELLHA
PATVCGPKKSTPLVKNKCVNFNFNGLTGTGVLTESNKKFLPFQQFGRDIADITDAVRDPQTLEIL
DITPCSFGGVSVITPGTNTSNQVAVLYQNVNCTEVPVAIHADQLTPTWRVYSTGSNVFQTRAGCL
IGAEHVNNSYECDIPIGAGICASYQTQTNSPRRARSVASQSIIAYTMSLGAENSVAYSNNSIAIP
TNFTISVTTEILPVSMTKTSVDCTMYICGDSTECSNLLLQYGSFCTQLNRALTGIAVEQDKNTQE
VFAQVKQIYKTPPIKDFGGFNFSQILPDPSKPSKRSFIEDLLFNKVTLADAGFIKQYGDCLGDIA
ARDLICAQKFNGLTVLPPLLTDEMIAQYTSALLAGTITSGWTFGAGAALQIPFAMQMAYRFNGIG
VTQNVLYENQKLIANQFNSAIGKIQDSLSSTASALGKLQDVVNQNAQALNTLVKQLSSNFGAISS
VLNDILSRLDPPEAEVQIDRLITGRLQSLQTYVTQQLIRAAEIRASANLAATKMSECVLGQSKRV
DFCGKGYHLMSFPQSAPHGVVFLHVTYVPAQEKNFTTAPAICHDGKAHFPREGVFVSNGTHWFVT
QRNFYEPQIITTDNTFVSGNCDVVIGIVNNTVYDPLQPELDSFKEELDKYFKNHTSPDVDLGDIS
GINASVVNIQKEIDRLNEVAKNLNESLIDLQELGKYEQYIKWPWYIWLGFIAGLIAIVMVTIMLC
CMTSCCSCLKGCCSCGSCCKFDEDDSEPVLKGVKLHYT
SEQ ID NO 373: SEQ ID NO 195 + D614N + T572I +
G880C + F888C
MFVFLVLLPLVSSQCVNLTTRTQLPPAYTNSFTRGVYYPDKVFRSSVLHSTQDLFLPFFSNVTWF
HAIHVSGTNGTKRFDNPVLPFNDGVYFASTEKSNIIRGWIFGTTLDSKTQSLLIVNNATNVVIKV
CEFQFCNDPFLGVYYHKNNKSWMESEFRVYSSANNCTFEYVSQPFLMDLEGKQGNFKNLREFVFK
NIDGYFKIYSKHTPINLVRDLPQGFSALEPLVDLPIGINITRFQTLLALHRSYLTPGDSSSGWTA
GAAAYYVGYLQPRTFLLKYNENGTITDAVDCALDPLSETKCTLKSFTVEKGIYQTSNFRVQPTES
IVRFPNITNLCPFGEVFNATRFASVYAWNRKRISNCVADYSVLYNSASFSTFKCYGVSPTKLNDL
CFTNVYADSFVIRGDEVRQIAPGQTGKIADYNYKLPDDFTGCVIAWNSNNLDSKVGGNYNYLYRL
FRKSNLKPFERDISTEIYQAGSTPCNGVEGFNCYFPLQSYGFQPTNGVGYQPYRVVVLSFELLHA
PATVCGPKKSTNLVKNKCVNFNFNGLTGTGVLTESNKKFLPFQQFGRDIADITDAVRDPQTLEIL
DITPCSFGGVSVITPGTNTSNQVAVLYQNVNCTEVPVAIHADQLTPTWRVYSTGSNVFQTRAGCL
IGAEHVNNSYECDIPIGAGICASYQTQTNSPRRARSVASQSIIAYTMSLGAENSVAYSNNSIAIP
TNFTISVTTEILPVSMTKTSVDCTMYICGDSTECSNLLLQYGSFCTQLNRALTGIAVEQDKNTQE
VFAQVKQIYKTPPIKDFGGFNFSQILPDPSKPSKRSFIEDLLFNKVTLADAGFIKQYGDCLGDIA
ARDLICAQKFNGLTVLPPLLTDEMIAQYTSALLACTITSGWTCGAGAALQIPFAMQMAYRFNGIG
VTQNVLYENQKLIANQFNSAIGKIQDSLSSTASALGKLQDVVNQNAQALNTLVKQLSSNFGAISS
VLNDILSRLDPPEAEVQIDRLITGRLQSLQTYVTQQLIRAAEIRASANLAATKMSECVLGQSKRV
DFCGKGYHLMSFPQSAPHGVVFLHVTYVPAQEKNFTTAPAICHDGKAHFPREGVFVSNGTHWFVT
QRNFYEPQIITTDNTFVSGNCDVVIGIVNNTVYDPLQPELDSFKEELDKYFKNHTSPDVDLGDIS
GINASVVNIQKEIDRLNEVAKNLNESLIDLQELGKYEQYIKWPWYIWLGFIAGLIAIVMVTIMLC
CMTSCCSCLKGCCSCGSCCKFDEDDSEPVLKGVKLHYT
SEQ ID NO 374: SEQ ID NO 195 + D614N + T572I +
S884C + A893C
MFVFLVLLPLVSSQCVNLTTRTQLPPAYTNSFTRGVYYPDKVFRSSVLHSTQDLFLPFFSNVTWF
HAIHVSGTNGTKRFDNPVLPFNDGVYFASTEKSNIIRGWIFGTTLDSKTQSLLIVNNATNVVIKV
CEFQFCNDPFLGVYYHKNNKSWMESEFRVYSSANNCTFEYVSQPFLMDLEGKQGNFKNLREFVFK
NIDGYFKIYSKHTPINLVRDLPQGFSALEPLVDLPIGINITRFQTLLALHRSYLTPGDSSSGWTA
GAAAYYVGYLQPRTFLLKYNENGTITDAVDCALDPLSETKCTLKSFTVEKGIYQTSNFRVQPTES
IVRFPNITNLCPFGEVFNATRFASVYAWNRKRISNCVADYSVLYNSASFSTFKCYGVSPTKLNDL
CFTNVYADSFVIRGDEVRQIAPGQTGKIADYNYKLPDDFTGCVIAWNSNNLDSKVGGNYNYLYRL
FRKSNLKPFERDISTEIYQAGSTPCNGVEGFNCYFPLQSYGFQPTNGVGYQPYRVVVLSFELLHA
PATVCGPKKSTNLVKNKCVNFNFNGLTGTGVLTESNKKFLPFQQFGRDIADITDAVRDPQTLEIL
DITPCSFGGVSVITPGTNTSNQVAVLYQNVNCTEVPVAIHADQLTPTWRVYSTGSNVFQTRAGCL
IGAEHVNNSYECDIPIGAGICASYQTQTNSPRRARSVASQSIIAYTMSLGAENSVAYSNNSIAIP
TNFTISVTTEILPVSMTKTSVDCTMYICGDSTECSNLLLQYGSFCTQLNRALTGIAVEQDKNTQE
VFAQVKQIYKTPPIKDFGGFNFSQILPDPSKPSKRSFIEDLLFNKVTLADAGFIKQYGDCLGDIA
ARDLICAQKFNGLTVLPPLLTDEMIAQYTSALLAGTITCGWTFGAGACLQIPFAMQMAYRFNGIG
VTQNVLYENQKLIANQFNSAIGKIQDSLSSTASALGKLQDVVNQNAQALNTLVKQLSSNFGAISS
VLNDILSRLDPPEAEVQIDRLITGRLQSLQTYVTQQLIRAAEIRASANLAATKMSECVLGQSKRV
DFCGKGYHLMSFPQSAPHGVVFLHVTYVPAQEKNFTTAPAICHDGKAHFPREGVFVSNGTHWFVT
QRNFYEPQIITTDNTFVSGNCDVVIGIVNNTVYDPLQPELDSFKEELDKYFKNHTSPDVDLGDIS
GINASVVNIQKEIDRLNEVAKNLNESLIDLQELGKYEQYIKWPWYIWLGFIAGLIAIVMVTIMLC
CMTSCCSCLKGCCSCGSCCKFDEDDSEPVLKGVKLHYT
SEQ ID NO 375: SEQ ID NO 195 + D614N + N532P + G880C + F888C
MFVFLVLLPLVSSQCVNLTTRTQLPPAYTNSFTRGVYYPDKVFRSSVLHSTQDLFLPFFSNVTWF
HAIHVSGTNGTKRFDNPVLPFNDGVYFASTEKSNIIRGWIFGTTLDSKTQSLLIVNNATNVVIKV
CEFQFCNDPFLGVYYHKNNKSWMESEFRVYSSANNCTFEYVSQPFLMDLEGKQGNFKNLREFVFK
NIDGYFKIYSKHTPINLVRDLPQGFSALEPLVDLPIGINITRFQTLLALHRSYLTPGDSSSGWTA
GAAAYYVGYLQPRTFLLKYNENGTITDAVDCALDPLSETKCTLKSFTVEKGIYQTSNFRVQPTES
IVRFPNITNLCPFGEVFNATRFASVYAWNRKRISNCVADYSVLYNSASFSTFKCYGVSPTKLNDL
CFTNVYADSFVIRGDEVRQIAPGQTGKIADYNYKLPDDFTGCVIAWNSNNLDSKVGGNYNYLYRL
FRKSNLKPFERDISTEIYQAGSTPCNGVEGFNCYFPLQSYGFQPTNGVGYQPYRVVVLSFELLHA
PATVCGPKKSTPLVKNKCVNFNFNGLTGTGVLTESNKKFLPFQQFGRDIADTTDAVRDPQTLEIL
DITPCSFGGVSVITPGTNTSNQVAVLYQNVNCTEVPVAIHADQLTPTWRVYSTGSNVFQTRAGCL
IGAEHVNNSYECDIPIGAGICASYQTQTNSPRRARSVASQSIIAYTMSLGAENSVAYSNNSIAIP
TNFTISVTTEILPVSMTKTSVDCTMYICGDSTECSNLLLQYGSFCTQLNRALTGIAVEQDKNTQE
VFAQVKQIYKTPPIKDFGGFNFSQILPDPSKPSKRSFIEDLLFNKVTLADAGFIKQYGDCLGDIA
ARDLICAQKFNGLTVLPPLLTDEMIAQYTSALLACTITSGWTCGAGAALQIPFAMQMAYRFNGIG
VTQNVLYENQKLIANQFNSAIGKIQDSLSSTASALGKLQDVVNQNAQALNTLVKQLSSNFGAISS
VLNDILSRLDPPEAEVQIDRLITGRLQSLQTYVTQQLIRAAEIRASANLAATKMSECVLGQSKRV
DFCGKGYHLMSFPQSAPHGVVFLHVTYVPAQEKNFTTAPAICHDGKAHFPREGVFVSNGTHWFVT
QRNFYEPQIITTDNTFVSGNCDVVIGIVNNTVYDPLQPELDSFKEELDKYFKNHTSPDVDLGDIS
GINASVVNIQKEIDRLNEVAKNLNESLIDLQELGKYEQYIKWPWYIWLGFIAGLIAIVMVTIMLC
CMTSCCSCLKGCCSCGSCCKFDEDDSEPVLKGVKLHYT
SEQ ID NO 376: SEQ ID NO 195 + D614N + N532P + S884C + A893C
MFVFLVLLPLVSSQCVNLTTRTQLPPAYTNSFTRGVYYPDKVFRSSVLHSTQDLFLPFFSNVTWF
HAIHVSGTNGTKRFDNPVLPFNDGVYFASTEKSNIIRGWIFGTTLDSKTQSLLIVNNATNVVIKV
CEFQFCNDPFLGVYYHKNNKSWMESEFRVYSSANNCTFEYVSQPFLMDLEGKQGNFKNLREFVFK
NIDGYFKIYSKHTPINLVRDLPQGFSALEPLVDLPIGINITRFQTLLALHRSYLTPGDSSSGWTA
GAAAYYVGYLQPRTFLLKYNENGTITDAVDCALDPLSETKCTLKSFTVEKGIYQTSNFRVQPTES
IVRFPNITNLCPFGEVFNATRFASVYAWNRKRISNCVADYSVLYNSASFSTFKCYGVSPTKLNDL
CFTNVYADSFVIRGDEVRQIAPGQTGKIADYNYKLPDDFTGCVIAWNSNNLDSKVGGNYNYLYRL
FRKSNLKPFERDISTEIYQAGSTPCNGVEGFNCYFPLQSYGFQPTNGVGYQPYRVVVLSFELLHA
PATVCGPKKSTPLVKNKCVNFNFNGLTGTGVLTESNKKFLPFQQFGRDIADTTDAVRDPQTLEIL
DITPCSFGGVSVITPGTNTSNQVAVLYQNVNCTEVPVAIHADQLTPTWRVYSTGSNVFQTRAGCL
IGAEHVNNSYECDIPIGAGICASYQTQTNSPRRARSVASQSIIAYTMSLGAENSVAYSNNSIAIP
TNFTISVTTEILPVSMTKTSVDCTMYICGDSTECSNLLLQYGSFCTQLNRALTGIAVEQDKNTQE
VFAQVKQIYKTPPIKDFGGFNFSQILPDPSKPSKRSFIEDLLFNKVTLADAGFIKQYGDCLGDIA
ARDLICAQKFNGLTVLPPLLTDEMIAQYTSALLAGTITCGWTFGAGACLQIPFAMQMAYRFNGIG
VTQNVLYENQKLIANQFNSAIGKIQDSLSSTASALGKLQDVVNQNAQALNTLVKQLSSNFGAISS
VLNDILSRLDPPEAEVQIDRLITGRLQSLQTYVTQQLIRAAEIRASANLAATKMSECVLGQSKRV
DFCGKGYHLMSFPQSAPHGVVFLHVTYVPAQEKNFTTAPAICHDGKAHFPREGVFVSNGTHWFVT
QRNFYEPQIITTDNTFVSGNCDVVIGIVNNTVYDPLQPELDSFKEELDKYFKNHTSPDVDLGDIS
GINASVVNIQKEIDRLNEVAKNLNESLIDLQELGKYEQYIKWPWYIWLGFIAGLIAIVMVTIMLC
CMTSCCSCLKGCCSCGSCCKFDEDDSEPVLKGVKLHYT
SEQ ID NO 377: SEQ ID NO 195 + T572I +
N532P + G880C + F888C
MFVFLVLLPLVSSQCVNLTTRTQLPPAYTNSFTRGVYYPDKVFRSSVLHSTQDLFLPFFSNVTWF
HAIHVSGTNGTKRFDNPVLPFNDGVYFASTEKSNIIRGWIFGTTLDSKTQSLLIVNNATNVVIKV
CEFQFCNDPFLGVYYHKNNKSWMESEFRVYSSANNCTFEYVSQPFLMDLEGKQGNFKNLREFVFK
NIDGYFKIYSKHTPINLVRDLPQGFSALEPLVDLPIGINITRFQTLLALHRSYLTPGDSSSGWTA
GAAAYYVGYLQPRTFLLKYNENGTITDAVDCALDPLSETKCTLKSFTVEKGIYQTSNFRVQPTES
IVRFPNITNLCPFGEVFNATRFASVYAWNRKRISNCVADYSVLYNSASFSTFKCYGVSPTKLNDL
CFTNVYADSFVIRGDEVRQIAPGQTGKIADYNYKLPDDFTGCVIAWNSNNLDSKVGGNYNYLYRL
FRKSNLKPFERDISTEIYQAGSTPCNGVEGFNCYFPLQSYGFQPTNGVGYQPYRVVVLSFELLHA
PATVCGPKKSTPLVKNKCVNFNFNGLTGTGVLTESNKKFLPFQQFGRDIADITDAVRDPQTLEIL
DITPCSFGGVSVITPGTNTSNQVAVLYQDVNCTEVPVAIHADQLTPTWRVYSTGSNVFQTRAGCL
IGAEHVNNSYECDIPIGAGICASYQTQTNSPRRARSVASQSIIAYTMSLGAENSVAYSNNSIAIP
TNFTISVTTEILPVSMTKTSVDCTMYICGDSTECSNLLLQYGSFCTQLNRALTGIAVEQDKNTQE
VFAQVKQIYKTPPIKDFGGFNFSQILPDPSKPSKRSFIEDLLFNKVTLADAGFIKQYGDCLGDIA
ARDLICAQKFNGLTVLPPLLTDEMIAQYTSALLACTITSGWTCGAGAALQIPFAMQMAYRFNGIG
VTQNVLYENQKLIANQFNSAIGKIQDSLSSTASALGKLQDVVNQNAQALNTLVKQLSSNFGAISS
VLNDILSRLDPPEAEVQIDRLITGRLQSLQTYVTQQLIRAAEIRASANLAATKMSECVLGQSKRV
DFCGKGYHLMSFPQSAPHGVVFLHVTYVPAQEKNFTTAPAICHDGKAHFPREGVFVSNGTHWFVT
QRNFYEPQIITTDNTFVSGNCDVVIGIVNNTVYDPLQPELDSFKEELDKYFKNHTSPDVDLGDIS
GINASVVNIQKEIDRLNEVAKNLNESLIDLQELGKYEQYIKWPWYIWLGFIAGLIAIVMVTIMLC
CMTSCCSCLKGCCSCGSCCKFDEDDSEPVLKGVKLHYT
SEQ ID NO 378: SEQ ID NO 195 + T572I +
N532P + S884C + A893C
MFVFLVLLPLVSSQCVNLTTRTQLPPAYTNSFTRGVYYPDKVFRSSVLHSTQDLFLPFFSNVTWF
HAIHVSGTNGTKRFDNPVLPFNDGVYFASTEKSNIIRGWIFGTTLDSKTQSLLIVNNATNVVIKV
CEFQFCNDPFLGVYYHKNNKSWMESEFRVYSSANNCTFEYVSQPFLMDLEGKQGNFKNLREFVFK
NIDGYFKIYSKHTPINLVRDLPQGFSALEPLVDLPIGINITRFQTLLALHRSYLTPGDSSSGWTA
GAAAYYVGYLQPRTFLLKYNENGTITDAVDCALDPLSETKCTLKSFTVEKGIYQTSNFRVQPTES
IVRFPNITNLCPFGEVFNATRFASVYAWNRKRISNCVADYSVLYNSASFSTFKCYGVSPTKLNDL
CFTNVYADSFVIRGDEVRQIAPGQTGKIADYNYKLPDDFTGCVIAWNSNNLDSKVGGNYNYLYRL
FRKSNLKPFERDISTEIYQAGSTPCNGVEGFNCYFPLQSYGFQPTNGVGYQPYRVVVLSFELLHA
PATVCGPKKSTPLVKNKCVNFNFNGLTGTGVLTESNKKFLPFQQFGRDIADITDAVRDPQTLEIL
DITPCSFGGVSVITPGTNTSNQVAVLYQDVNCTEVPVAIHADQLTPTWRVYSTGSNVFQTRAGCL
IGAEHVNNSYECDIPIGAGICASYQTQTNSPRRARSVASQSIIAYTMSLGAENSVAYSNNSIAIP
TNFTISVTTEILPVSMTKTSVDCTMYICGDSTECSNLLLQYGSFCTQLNRALTGIAVEQDKNTQE
VFAQVKQIYKTPPIKDFGGFNFSQILPDPSKPSKRSFIEDLLFNKVTLADAGFIKQYGDCLGDIA
ARDLICAQKFNGLTVLPPLLTDEMIAQYTSALLAGTITCGWTFGAGACLQIPFAMQMAYRFNGIG
VTQNVLYENQKLIANQFNSAIGKIQDSLSSTASALGKLQDVVNQNAQALNTLVKQLSSNFGAISS
VLNDILSRLDPPEAEVQIDRLITGRLQSLQTYVTQQLIRAAEIRASANLAATKMSECVLGQSKRV
DFCGKGYHLMSFPQSAPHGVVFLHVTYVPAQEKNFTTAPAICHDGKAHFPREGVFVSNGTHWFVT
QRNFYEPQIITTDNTFVSGNCDVVIGIVNNTVYDPLQPELDSFKEELDKYFKNHTSPDVDLGDIS
GINASVVNIQKEIDRLNEVAKNLNESLIDLQELGKYEQYIKWPWYIWLGFIAGLIAIVMVTIMLC
CMTSCCSCLKGCCSCGSCCKFDEDDSEPVLKGVKLHYT
SEQ ID NO 379: SEQ ID NO 195 + A942P + A892P + D614N + T572I
MFVFLVLLPLVSSQCVNLTTRTQLPPAYTNSFTRGVYYPDKVFRSSVLHSTQDLFLPFFSNVTWF
HAIHVSGTNGTKRFDNPVLPFNDGVYFASTEKSNIIRGWIFGTTLDSKTQSLLIVNNATNVVIKV
CEFQFCNDPFLGVYYHKNNKSWMESEFRVYSSANNCTFEYVSQPFLMDLEGKQGNFKNLREFVFK
NIDGYFKIYSKHTPINLVRDLPQGFSALEPLVDLPIGINITRFQTLLALHRSYLTPGDSSSGWTA
GAAAYYVGYLQPRTFLLKYNENGTITDAVDCALDPLSETKCTLKSFTVEKGIYQTSNFRVQPTES
IVRFPNITNLCPFGEVFNATRFASVYAWNRKRISNCVADYSVLYNSASFSTFKCYGVSPTKLNDL
CFTNVYADSFVIRGDEVRQIAPGQTGKIADYNYKLPDDFTGCVIAWNSNNLDSKVGGNYNYLYRL
FRKSNLKPFERDISTEIYQAGSTPCNGVEGFNCYFPLQSYGFQPTNGVGYQPYRVVVLSFELLHA
PATVCGPKKSTNLVKNKCVNFNFNGLTGTGVLTESNKKFLPFQQFGRDIADITDAVRDPQTLEIL
DITPCSFGGVSVITPGTNTSNQVAVLYQNVNCTEVPVAIHADQLTPTWRVYSTGSNVFQTRAGCL
IGAEHVNNSYECDIPIGAGICASYQTQTNSPRRARSVASQSIIAYTMSLGAENSVAYSNNSIAIP
TNFTISVTTEILPVSMTKTSVDCTMYICGDSTECSNLLLQYGSFCTQLNRALTGIAVEQDKNTQE
VFAQVKQIYKTPPIKDFGGFNFSQILPDPSKPSKRSFIEDLLFNKVTLADAGFIKQYGDCLGDIA
ARDLICAQKFNGLTVLPPLLTDEMIAQYTSALLAGTITSGWTFGAGPALQIPFAMQMAYRFNGIG
VTQNVLYENQKLIANQFNSAIGKIQDSLSSTPSALGKLQDVVNQNAQALNTLVKQLSSNFGAISS
VLNDILSRLDPPEAEVQIDRLITGRLQSLQTYVTQQLIRAAEIRASANLAATKMSECVLGQSKRV
DFCGKGYHLMSFPQSAPHGVVFLHVTYVPAQEKNFTTAPAICHDGKAHFPREGVFVSNGTHWFVT
QRNFYEPQIITTDNTFVSGNCDVVIGIVNNTVYDPLQPELDSFKEELDKYFKNHTSPDVDLGDIS
GINASVVNIQKEIDRLNEVAKNLNESLIDLQELGKYEQYIKWPWYIWLGFIAGLIAIVMVTIMLC
CMTSCCSCLKGCCSCGSCCKFDEDDSEPVLKGVKLHYT
SEQ ID NO 380: SEQ ID NO 195 + A942P + A892P + D614N + N532P
MFVFLVLLPLVSSQCVNLTTRTQLPPAYTNSFTRGVYYPDKVFRSSVLHSTQDLFLPFFSNVTWF
HAIHVSGTNGTKRFDNPVLPFNDGVYFASTEKSNIIRGWIFGTTLDSKTQSLLIVNNATNVVIKV
CEFQFCNDPFLGVYYHKNNKSWMESEFRVYSSANNCTFEYVSQPFLMDLEGKQGNFKNLREFVFK
NIDGYFKIYSKHTPINLVRDLPQGFSALEPLVDLPIGINITRFQTLLALHRSYLTPGDSSSGWTA
GAAAYYVGYLQPRTFLLKYNENGTITDAVDCALDPLSETKCTLKSFTVEKGIYQTSNFRVQPTES
IVRFPNITNLCPFGEVFNATRFASVYAWNRKRISNCVADYSVLYNSASFSTFKCYGVSPTKLNDL
CFTNVYADSFVIRGDEVRQIAPGQTGKIADYNYKLPDDFTGCVIAWNSNNLDSKVGGNYNYLYRL
FRKSNLKPFERDISTEIYQAGSTPCNGVEGFNCYFPLQSYGFQPTNGVGYQPYRVVVLSFELLHA
PATVCGPKKSTPLVKNKCVNFNFNGLTGTGVLTESNKKFLPFQQFGRDIADTTDAVRDPQTLEIL
DITPCSFGGVSVITPGTNTSNQVAVLYQNVNCTEVPVAIHADQLTPTWRVYSTGSNVFQTRAGCL
IGAEHVNNSYECDIPIGAGICASYQTQTNSPRRARSVASQSIIAYTMSLGAENSVAYSNNSIAIP
TNFTISVTTEILPVSMTKTSVDCTMYICGDSTECSNLLLQYGSFCTQLNRALTGIAVEQDKNTQE
VFAQVKQIYKTPPIKDFGGFNFSQILPDPSKPSKRSFIEDLLFNKVTLADAGFIKQYGDCLGDIA
ARDLICAQKFNGLTVLPPLLTDEMIAQYTSALLAGTITSGWTFGAGPALQIPFAMQMAYRFNGIG
VTQNVLYENQKLIANQFNSAIGKIQDSLSSTPSALGKLQDVVNQNAQALNTLVKQLSSNFGAISS
VLNDILSRLDPPEAEVQIDRLITGRLQSLQTYVTQQLIRAAEIRASANLAATKMSECVLGQSKRV
DFCGKGYHLMSFPQSAPHGVVFLHVTYVPAQEKNFTTAPAICHDGKAHFPREGVFVSNGTHWFVT
QRNFYEPQIITTDNTFVSGNCDVVIGIVNNTVYDPLQPELDSFKEELDKYFKNHTSPDVDLGDIS
GINASVVNIQKEIDRLNEVAKNLNESLIDLQELGKYEQYIKWPWYIWLGFIAGLIAIVMVTIMLC
CMTSCCSCLKGCCSCGSCCKFDEDDSEPVLKGVKLHYT
SEQ ID NO 381: SEQ ID NO 195 + A942P + A892P + D614N +
G880C + F888C
MFVFLVLLPLVSSQCVNLTTRTQLPPAYTNSFTRGVYYPDKVFRSSVLHSTQDLFLPFFSNVTWF
HAIHVSGTNGTKRFDNPVLPFNDGVYFASTEKSNIIRGWIFGTTLDSKTQSLLIVNNATNVVIKV
CEFQFCNDPFLGVYYHKNNKSWMESEFRVYSSANNCTFEYVSQPFLMDLEGKQGNFKNLREFVFK
NIDGYFKIYSKHTPINLVRDLPQGFSALEPLVDLPIGINITRFQTLLALHRSYLTPGDSSSGWTA
GAAAYYVGYLQPRTFLLKYNENGTITDAVDCALDPLSETKCTLKSFTVEKGIYQTSNFRVQPTES
IVRFPNITNLCPFGEVFNATRFASVYAWNRKRISNCVADYSVLYNSASFSTFKCYGVSPTKLNDL
CFTNVYADSFVIRGDEVRQIAPGQTGKIADYNYKLPDDFTGCVIAWNSNNLDSKVGGNYNYLYRL
FRKSNLKPFERDISTEIYQAGSTPCNGVEGFNCYFPLQSYGFQPTNGVGYQPYRVVVLSFELLHA
PATVCGPKKSTNLVKNKCVNFNFNGLTGTGVLTESNKKFLPFQQFGRDIADTTDAVRDPQTLEIL
DITPCSFGGVSVITPGTNTSNQVAVLYQNVNCTEVPVAIHADQLTPTWRVYSTGSNVFQTRAGCL
IGAEHVNNSYECDIPIGAGICASYQTQTNSPRRARSVASQSIIAYTMSLGAENSVAYSNNSIAIP
TNFTISVTTEILPVSMTKTSVDCTMYICGDSTECSNLLLQYGSFCTQLNRALTGIAVEQDKNTQE
VFAQVKQIYKTPPIKDFGGFNFSQILPDPSKPSKRSFIEDLLFNKVTLADAGFIKQYGDCLGDIA
ARDLICAQKFNGLTVLPPLLTDEMIAQYTSALLACTITSGWTCGAGPALQIPFAMQMAYRFNGIG
VTQNVLYENQKLIANQFNSAIGKIQDSLSSTPSALGKLQDVVNQNAQALNTLVKQLSSNFGAISS
VLNDILSRLDPPEAEVQIDRLITGRLQSLQTYVTQQLIRAAEIRASANLAATKMSECVLGQSKRV
DFCGKGYHLMSFPQSAPHGVVFLHVTYVPAQEKNFTTAPAICHDGKAHFPREGVFVSNGTHWFVT
QRNFYEPQIITTDNTFVSGNCDVVIGIVNNTVYDPLQPELDSFKEELDKYFKNHTSPDVDLGDIS
GINASVVNIQKEIDRLNEVAKNLNESLIDLQELGKYEQYIKWPWYIWLGFIAGLIAIVMVTIMLC
CMTSCCSCLKGCCSCGSCCKFDEDDSEPVLKGVKLHYT
SEQ ID NO 382: SEQ ID NO 195 + A942P + A892P + D614N +
S884C + A893C
MFVFLVLLPLVSSQCVNLTTRTQLPPAYTNSFTRGVYYPDKVFRSSVLHSTQDLFLPFFSNVTWF
HAIHVSGTNGTKRFDNPVLPFNDGVYFASTEKSNIIRGWIFGTTLDSKTQSLLIVNNATNVVIKV
CEFQFCNDPFLGVYYHKNNKSWMESEFRVYSSANNCTFEYVSQPFLMDLEGKQGNFKNLREFVFK
NIDGYFKIYSKHTPINLVRDLPQGFSALEPLVDLPIGINITRFQTLLALHRSYLTPGDSSSGWTA
GAAAYYVGYLQPRTFLLKYNENGTITDAVDCALDPLSETKCTLKSFTVEKGIYQTSNFRVQPTES
IVRFPNITNLCPFGEVFNATRFASVYAWNRKRISNCVADYSVLYNSASFSTFKCYGVSPTKLNDL
CFTNVYADSFVIRGDEVRQIAPGQTGKIADYNYKLPDDFTGCVIAWNSNNLDSKVGGNYNYLYRL
FRKSNLKPFERDISTEIYQAGSTPCNGVEGFNCYFPLQSYGFQPTNGVGYQPYRVVVLSFELLHA
PATVCGPKKSTNLVKNKCVNFNFNGLTGTGVLTESNKKFLPFQQFGRDIADTTDAVRDPQTLEIL
DITPCSFGGVSVITPGTNTSNQVAVLYQNVNCTEVPVAIHADQLTPTWRVYSTGSNVFQTRAGCL
IGAEHVNNSYECDIPIGAGICASYQTQTNSPRRARSVASQSIIAYTMSLGAENSVAYSNNSIAIP
TNFTISVTTEILPVSMTKTSVDCTMYICGDSTECSNLLLQYGSFCTQLNRALTGIAVEQDKNTQE
VFAQVKQIYKTPPIKDFGGFNFSQILPDPSKPSKRSFIEDLLFNKVTLADAGFIKQYGDCLGDIA
ARDLICAQKFNGLTVLPPLLTDEMIAQYTSALLAGTITCGWTFGAGPCLQIPFAMQMAYRFNGIG
VTQNVLYENQKLIANQFNSAIGKIQDSLSSTPSALGKLQDVVNQNAQALNTLVKQLSSNFGAISS
VLNDILSRLDPPEAEVQIDRLITGRLQSLQTYVTQQLIRAAEIRASANLAATKMSECVLGQSKRV
DFCGKGYHLMSFPQSAPHGVVFLHVTYVPAQEKNFTTAPAICHDGKAHFPREGVFVSNGTHWFVT
QRNFYEPQIITTDNTFVSGNCDVVIGIVNNTVYDPLQPELDSFKEELDKYFKNHTSPDVDLGDIS
GINASVVNIQKEIDRLNEVAKNLNESLIDLQELGKYEQYIKWPWYIWLGFIAGLIAIVMVTIMLC
CMTSCCSCLKGCCSCGSCCKFDEDDSEPVLKGVKLHYT
SEQ ID NO 383: SEQ ID NO 195 + A942P + A892P + T572I +
N532P
MFVFLVLLPLVSSQCVNLTTRTQLPPAYTNSFTRGVYYPDKVFRSSVLHSTQDLFLPFFSNVTWF
HAIHVSGTNGTKRFDNPVLPFNDGVYFASTEKSNIIRGWIFGTTLDSKTQSLLIVNNATNVVIKV
CEFQFCNDPFLGVYYHKNNKSWMESEFRVYSSANNCTFEYVSQPFLMDLEGKQGNFKNLREFVFK
NIDGYFKIYSKHTPINLVRDLPQGFSALEPLVDLPIGINITRFQTLLALHRSYLTPGDSSSGWTA
GAAAYYVGYLQPRTFLLKYNENGTITDAVDCALDPLSETKCTLKSFTVEKGIYQTSNFRVQPTES
IVRFPNITNLCPFGEVFNATRFASVYAWNRKRISNCVADYSVLYNSASFSTFKCYGVSPTKLNDL
CFTNVYADSFVIRGDEVRQIAPGQTGKIADYNYKLPDDFTGCVIAWNSNNLDSKVGGNYNYLYRL
FRKSNLKPFERDISTEIYQAGSTPCNGVEGFNCYFPLQSYGFQPTNGVGYQPYRVVVLSFELLHA
PATVCGPKKSTPLVKNKCVNFNFNGLTGTGVLTESNKKFLPFQQFGRDIADITDAVRDPQTLEIL
DITPCSFGGVSVITPGTNTSNQVAVLYQDVNCTEVPVAIHADQLTPTWRVYSTGSNVFQTRAGCL
IGAEHVNNSYECDIPIGAGICASYQTQTNSPRRARSVASQSIIAYTMSLGAENSVAYSNNSIAIP
TNFTISVTTEILPVSMTKTSVDCTMYICGDSTECSNLLLQYGSFCTQLNRALTGIAVEQDKNTQE
VFAQVKQIYKTPPIKDFGGFNFSQILPDPSKPSKRSFIEDLLFNKVTLADAGFIKQYGDCLGDIA
ARDLICAQKFNGLTVLPPLLTDEMIAQYTSALLAGTITSGWTFGAGPALQIPFAMQMAYRFNGIG
VTQNVLYENQKLIANQFNSAIGKIQDSLSSTPSALGKLQDVVNQNAQALNTLVKQLSSNFGAISS
VLNDILSRLDPPEAEVQIDRLITGRLQSLQTYVTQQLIRAAEIRASANLAATKMSECVLGQSKRV
DFCGKGYHLMSFPQSAPHGVVFLHVTYVPAQEKNFTTAPAICHDGKAHFPREGVFVSNGTHWFVT
QRNFYEPQIITTDNTFVSGNCDVVIGIVNNTVYDPLQPELDSFKEELDKYFKNHTSPDVDLGDIS
GINASVVNIQKEIDRLNEVAKNLNESLIDLQELGKYEQYIKWPWYIWLGFIAGLIAIVMVTIMLC
CMTSCCSCLKGCCSCGSCCKFDEDDSEPVLKGVKLHYT
SEQ ID NO 384: SEQ ID NO 195 + A942P + A892P + T572I +
G880C + F888C
MFVFLVLLPLVSSQCVNLTTRTQLPPAYTNSFTRGVYYPDKVFRSSVLHSTQDLFLPFFSNVTWF
HAIHVSGTNGTKRFDNPVLPFNDGVYFASTEKSNIIRGWIFGTTLDSKTQSLLIVNNATNVVIKV
CEFQFCNDPFLGVYYHKNNKSWMESEFRVYSSANNCTFEYVSQPFLMDLEGKQGNFKNLREFVFK
NIDGYFKIYSKHTPINLVRDLPQGFSALEPLVDLPIGINITRFQTLLALHRSYLTPGDSSSGWTA
GAAAYYVGYLQPRTFLLKYNENGTITDAVDCALDPLSETKCTLKSFTVEKGIYQTSNFRVQPTES
IVRFPNITNLCPFGEVFNATRFASVYAWNRKRISNCVADYSVLYNSASFSTFKCYGVSPTKLNDL
CFTNVYADSFVIRGDEVRQIAPGQTGKIADYNYKLPDDFTGCVIAWNSNNLDSKVGGNYNYLYRL
FRKSNLKPFERDISTEIYQAGSTPCNGVEGFNCYFPLQSYGFQPTNGVGYQPYRVVVLSFELLHA
PATVCGPKKSTNLVKNKCVNFNFNGLTGTGVLTESNKKFLPFQQFGRDIADITDAVRDPQTLEIL
DITPCSFGGVSVITPGTNTSNQVAVLYQDVNCTEVPVAIHADQLTPTWRVYSTGSNVFQTRAGCL
IGAEHVNNSYECDIPIGAGICASYQTQTNSPRRARSVASQSIIAYTMSLGAENSVAYSNNSIAIP
TNFTISVTTEILPVSMTKTSVDCTMYICGDSTECSNLLLQYGSFCTQLNRALTGIAVEQDKNTQE
VFAQVKQIYKTPPIKDFGGFNFSQILPDPSKPSKRSFIEDLLFNKVTLADAGFIKQYGDCLGDIA
ARDLICAQKFNGLTVLPPLLTDEMIAQYTSALLACTITSGWTCGAGPALQIPFAMQMAYRFNGIG
VTQNVLYENQKLIANQFNSAIGKIQDSLSSTPSALGKLQDVVNQNAQALNTLVKQLSSNFGAISS
VLNDILSRLDPPEAEVQIDRLITGRLQSLQTYVTQQLIRAAEIRASANLAATKMSECVLGQSKRV
DFCGKGYHLMSFPQSAPHGVVFLHVTYVPAQEKNFTTAPAICHDGKAHFPREGVFVSNGTHWFVT
QRNFYEPQIITTDNTFVSGNCDVVIGIVNNTVYDPLQPELDSFKEELDKYFKNHTSPDVDLGDIS
GINASVVNIQKEIDRLNEVAKNLNESLIDLQELGKYEQYIKWPWYIWLGFIAGLIAIVMVTIMLC
CMTSCCSCLKGCCSCGSCCKFDEDDSEPVLKGVKLHYT
SEQ ID NO 385: SEQ ID NO 195 + A942P + A892P + T572I +
S884C + A893C
MFVFLVLLPLVSSQCVNLTTRTQLPPAYTNSFTRGVYYPDKVFRSSVLHSTQDLFLPFFSNVTWF
HAIHVSGTNGTKRFDNPVLPFNDGVYFASTEKSNIIRGWIFGTTLDSKTQSLLIVNNATNVVIKV
CEFQFCNDPFLGVYYHKNNKSWMESEFRVYSSANNCTFEYVSQPFLMDLEGKQGNFKNLREFVFK
NIDGYFKIYSKHTPINLVRDLPQGFSALEPLVDLPIGINITRFQTLLALHRSYLTPGDSSSGWTA
GAAAYYVGYLQPRTFLLKYNENGTITDAVDCALDPLSETKCTLKSFTVEKGIYQTSNFRVQPTES
IVRFPNITNLCPFGEVFNATRFASVYAWNRKRISNCVADYSVLYNSASFSTFKCYGVSPTKLNDL
CFTNVYADSFVIRGDEVRQIAPGQTGKIADYNYKLPDDFTGCVIAWNSNNLDSKVGGNYNYLYRL
FRKSNLKPFERDISTEIYQAGSTPCNGVEGFNCYFPLQSYGFQPTNGVGYQPYRVVVLSFELLHA
PATVCGPKKSTNLVKNKCVNFNFNGLTGTGVLTESNKKFLPFQQFGRDIADITDAVRDPQTLEIL
DITPCSFGGVSVITPGTNTSNQVAVLYQDVNCTEVPVAIHADQLTPTWRVYSTGSNVFQTRAGCL
IGAEHVNNSYECDIPIGAGICASYQTQTNSPRRARSVASQSIIAYTMSLGAENSVAYSNNSIAIP
TNFTISVTTEILPVSMTKTSVDCTMYICGDSTECSNLLLQYGSFCTQLNRALTGIAVEQDKNTQE
VFAQVKQIYKTPPIKDFGGFNFSQILPDPSKPSKRSFIEDLLFNKVTLADAGFIKQYGDCLGDIA
ARDLICAQKENGLTVLPPLLTDEMIAQYTSALLAGTITCGWTFGAGPCLQIPFAMQMAYRFNGIG
VTQNVLYENQKLIANQFNSAIGKIQDSLSSTPSALGKLQDVVNQNAQALNTLVKQLSSNFGAISS
VLNDILSRLDPPEAEVQIDRLITGRLQSLQTYVTQQLIRAAEIRASANLAATKMSECVLGQSKRV
DFCGKGYHLMSFPQSAPHGVVFLHVTYVPAQEKNFTTAPAICHDGKAHFPREGVFVSNGTHWFVT
QRNFYEPQIITTDNTFVSGNCDVVIGIVNNTVYDPLQPELDSFKEELDKYFKNHTSPDVDLGDIS
GINASVVNIQKEIDRLNEVAKNLNESLIDLQELGKYEQYIKWPWYIWLGFIAGLIAIVMVTIMLC
CMTSCCSCLKGCCSCGSCCKFDEDDSEPVLKGVKLHYT
SEQ ID NO 386: SEQ ID NO 195 + A942P + A892P + N532P + G880C + F888C
MFVFLVLLPLVSSQCVNLTTRTQLPPAYTNSFTRGVYYPDKVFRSSVLHSTQDLFLPFFSNVTWF
HAIHVSGTNGTKRFDNPVLPFNDGVYFASTEKSNIIRGWIFGTTLDSKTQSLLIVNNATNVVIKV
CEFQFCNDPFLGVYYHKNNKSWMESEFRVYSSANNCTFEYVSQPFLMDLEGKQGNFKNLREFVFK
NIDGYFKIYSKHTPINLVRDLPQGFSALEPLVDLPIGINITRFQTLLALHRSYLTPGDSSSGWTA
GAAAYYVGYLQPRTFLLKYNENGTITDAVDCALDPLSETKCTLKSFTVEKGIYQTSNFRVQPTES
IVRFPNITNLCPFGEVFNATRFASVYAWNRKRISNCVADYSVLYNSASFSTFKCYGVSPTKLNDL
CFTNVYADSFVIRGDEVRQIAPGQTGKIADYNYKLPDDFTGCVIAWNSNNLDSKVGGNYNYLYRL
FRKSNLKPFERDISTEIYQAGSTPCNGVEGFNCYFPLQSYGFQPTNGVGYQPYRVVVLSFELLHA
PATVCGPKKSTPLVKNKCVNFNFNGLTGTGVLTESNKKFLPFQQFGRDIADTTDAVRDPQTLEIL
DITPCSFGGVSVITPGTNTSNQVAVLYQDVNCTEVPVAIHADQLTPTWRVYSTGSNVFQTRAGCL
IGAEHVNNSYECDIPIGAGICASYQTQTNSPRRARSVASQSIIAYTMSLGAENSVAYSNNSIAIP
TNFTISVTTEILPVSMTKTSVDCTMYICGDSTECSNLLLQYGSFCTQLNRALTGIAVEQDKNTQE
VFAQVKQIYKTPPIKDFGGFNFSQILPDPSKPSKRSFIEDLLFNKVTLADAGFIKQYGDCLGDIA
ARDLICAQKFNGLTVLPPLLTDEMIAQYTSALLACTITSGWTCGAGPALQIPFAMQMAYRFNGIG
VTQNVLYENQKLIANQFNSAIGKIQDSLSSTPSALGKLQDVVNQNAQALNTLVKQLSSNFGAISS
VLNDILSRLDPPEAEVQIDRLITGRLQSLQTYVTQQLIRAAEIRASANLAATKMSECVLGQSKRV
DFCGKGYHLMSFPQSAPHGVVFLHVTYVPAQEKNFTTAPAICHDGKAHFPREGVFVSNGTHWFVT
QRNFYEPQIITTDNTFVSGNCDVVIGIVNNTVYDPLQPELDSFKEELDKYFKNHTSPDVDLGDIS
GINASVVNIQKEIDRLNEVAKNLNESLIDLQELGKYEQYIKWPWYIWLGFIAGLIAIVMVTIMLC
CMTSCCSCLKGCCSCGSCCKFDEDDSEPVLKGVKLHYT
SEQ ID NO 387: SEQ ID NO 195 + A942P + A892P + N532P + S884C + A893C
MFVFLVLLPLVSSQCVNLTTRTQLPPAYTNSFTRGVYYPDKVFRSSVLHSTQDLFLPFFSNVTWF
HAIHVSGTNGTKRFDNPVLPFNDGVYFASTEKSNIIRGWIFGTTLDSKTQSLLIVNNATNVVIKV
CEFQFCNDPFLGVYYHKNNKSWMESEFRVYSSANNCTFEYVSQPFLMDLEGKQGNFKNLREFVFK
NIDGYFKIYSKHTPINLVRDLPQGFSALEPLVDLPIGINITRFQTLLALHRSYLTPGDSSSGWTA
GAAAYYVGYLQPRTFLLKYNENGTITDAVDCALDPLSETKCTLKSFTVEKGIYQTSNFRVQPTES
IVRFPNITNLCPFGEVFNATRFASVYAWNRKRISNCVADYSVLYNSASFSTFKCYGVSPTKLNDL
CFTNVYADSFVIRGDEVRQIAPGQTGKIADYNYKLPDDFTGCVIAWNSNNLDSKVGGNYNYLYRL
FRKSNLKPFERDISTEIYQAGSTPCNGVEGFNCYFPLQSYGFQPTNGVGYQPYRVVVLSFELLHA
PATVCGPKKSTPLVKNKCVNFNFNGLTGTGVLTESNKKFLPFQQFGRDIADTTDAVRDPQTLEIL
DITPCSFGGVSVITPGTNTSNQVAVLYQDVNCTEVPVAIHADQLTPTWRVYSTGSNVFQTRAGCL
IGAEHVNNSYECDIPIGAGICASYQTQTNSPRRARSVASQSIIAYTMSLGAENSVAYSNNSIAIP
TNFTISVTTEILPVSMTKTSVDCTMYICGDSTECSNLLLQYGSFCTQLNRALTGIAVEQDKNTQE
VFAQVKQIYKTPPIKDFGGFNFSQILPDPSKPSKRSFIEDLLFNKVTLADAGFIKQYGDCLGDIA
ARDLICAQKFNGLTVLPPLLTDEMIAQYTSALLAGTITCGWTFGAGPCLQIPFAMQMAYRFNGIG
VTQNVLYENQKLIANQFNSAIGKIQDSLSSTPSALGKLQDVVNQNAQALNTLVKQLSSNFGAISS
VLNDILSRLDPPEAEVQIDRLITGRLQSLQTYVTQQLIRAAEIRASANLAATKMSECVLGQSKRV
DFCGKGYHLMSFPQSAPHGVVFLHVTYVPAQEKNFTTAPAICHDGKAHFPREGVFVSNGTHWFVT
QRNFYEPQIITTDNTFVSGNCDVVIGIVNNTVYDPLQPELDSFKEELDKYFKNHTSPDVDLGDIS
GINASVVNIQKEIDRLNEVAKNLNESLIDLQELGKYEQYIKWPWYIWLGFIAGLIAIVMVTIMLC
CMTSCCSCLKGCCSCGSCCKFDEDDSEPVLKGVKLHYT
SEQ ID NO 388: SEQ ID NO 195 + A942P + D614N + T572I +
N532P
MFVFLVLLPLVSSQCVNLTTRTQLPPAYTNSFTRGVYYPDKVFRSSVLHSTQDLFLPFFSNVTWF
HAIHVSGTNGTKRFDNPVLPFNDGVYFASTEKSNIIRGWIFGTTLDSKTQSLLIVNNATNVVIKV
CEFQFCNDPFLGVYYHKNNKSWMESEFRVYSSANNCTFEYVSQPFLMDLEGKQGNFKNLREFVFK
NIDGYFKIYSKHTPINLVRDLPQGFSALEPLVDLPIGINITRFQTLLALHRSYLTPGDSSSGWTA
GAAAYYVGYLQPRTFLLKYNENGTITDAVDCALDPLSETKCTLKSFTVEKGIYQTSNFRVQPTES
IVRFPNITNLCPFGEVFNATRFASVYAWNRKRISNCVADYSVLYNSASFSTFKCYGVSPTKLNDL
CFTNVYADSFVIRGDEVRQIAPGQTGKIADYNYKLPDDFTGCVIAWNSNNLDSKVGGNYNYLYRL
FRKSNLKPFERDISTEIYQAGSTPCNGVEGFNCYFPLQSYGFQPTNGVGYQPYRVVVLSFELLHA
PATVCGPKKSTPLVKNKCVNFNFNGLTGTGVLTESNKKFLPFQQFGRDIADITDAVRDPQTLEIL
DITPCSFGGVSVITPGTNTSNQVAVLYQNVNCTEVPVAIHADQLTPTWRVYSTGSNVFQTRAGCL
IGAEHVNNSYECDIPIGAGICASYQTQTNSPRRARSVASQSIIAYTMSLGAENSVAYSNNSIAIP
TNFTISVTTEILPVSMTKTSVDCTMYICGDSTECSNLLLQYGSFCTQLNRALTGIAVEQDKNTQE
VFAQVKQIYKTPPIKDFGGFNFSQILPDPSKPSKRSFIEDLLFNKVTLADAGFIKQYGDCLGDIA
ARDLICAQKFNGLTVLPPLLTDEMIAQYTSALLAGTITSGWTFGAGAALQIPFAMQMAYRFNGIG
VTQNVLYENQKLIANQFNSAIGKIQDSLSSTPSALGKLQDVVNQNAQALNTLVKQLSSNFGAISS
VLNDILSRLDPPEAEVQIDRLITGRLQSLQTYVTQQLIRAAEIRASANLAATKMSECVLGQSKRV
DFCGKGYHLMSFPQSAPHGVVFLHVTYVPAQEKNFTTAPAICHDGKAHFPREGVFVSNGTHWFVT
QRNFYEPQIITTDNTFVSGNCDVVIGIVNNTVYDPLQPELDSFKEELDKYFKNHTSPDVDLGDIS
GINASVVNIQKEIDRLNEVAKNLNESLIDLQELGKYEQYIKWPWYIWLGFIAGLIAIVMVTIMLC
CMTSCCSCLKGCCSCGSCCKFDEDDSEPVLKGVKLHYT
SEQ ID NO 389: SEQ ID NO 195 + A942P + D614N + T572I +
G880C + F888C
MFVFLVLLPLVSSQCVNLTTRTQLPPAYTNSFTRGVYYPDKVFRSSVLHSTQDLFLPFFSNVTWF
HAIHVSGTNGTKRFDNPVLPFNDGVYFASTEKSNIIRGWIFGTTLDSKTQSLLIVNNATNVVIKV
CEFQFCNDPFLGVYYHKNNKSWMESEFRVYSSANNCTFEYVSQPFLMDLEGKQGNFKNLREFVFK
NIDGYFKIYSKHTPINLVRDLPQGFSALEPLVDLPIGINITRFQTLLALHRSYLTPGDSSSGWTA
GAAAYYVGYLQPRTFLLKYNENGTITDAVDCALDPLSETKCTLKSFTVEKGIYQTSNFRVQPTES
IVRFPNITNLCPFGEVFNATRFASVYAWNRKRISNCVADYSVLYNSASFSTFKCYGVSPTKLNDL
CFTNVYADSFVIRGDEVRQIAPGQTGKIADYNYKLPDDFTGCVIAWNSNNLDSKVGGNYNYLYRL
FRKSNLKPFERDISTEIYQAGSTPCNGVEGFNCYFPLQSYGFQPTNGVGYQPYRVVVLSFELLHA
PATVCGPKKSTNLVKNKCVNFNFNGLTGTGVLTESNKKFLPFQQFGRDIADITDAVRDPQTLEIL
DITPCSFGGVSVITPGTNTSNQVAVLYQNVNCTEVPVAIHADQLTPTWRVYSTGSNVFQTRAGCL
IGAEHVNNSYECDIPIGAGICASYQTQTNSPRRARSVASQSIIAYTMSLGAENSVAYSNNSIAIP
TNFTISVTTEILPVSMTKTSVDCTMYICGDSTECSNLLLQYGSFCTQLNRALTGIAVEQDKNTQE
VFAQVKQIYKTPPIKDFGGFNFSQILPDPSKPSKRSFIEDLLFNKVTLADAGFIKQYGDCLGDIA
ARDLICAQKFNGLTVLPPLLTDEMIAQYTSALLACTITSGWTCGAGAALQIPFAMQMAYRFNGIG
VTQNVLYENQKLIANQFNSAIGKIQDSLSSTPSALGKLQDVVNQNAQALNTLVKQLSSNFGAISS
VLNDILSRLDPPEAEVQIDRLITGRLQSLQTYVTQQLIRAAEIRASANLAATKMSECVLGQSKRV
DFCGKGYHLMSFPQSAPHGVVFLHVTYVPAQEKNFTTAPAICHDGKAHFPREGVFVSNGTHWFVT
QRNFYEPQIITTDNTFVSGNCDVVIGIVNNTVYDPLQPELDSFKEELDKYFKNHTSPDVDLGDIS
GINASVVNIQKEIDRLNEVAKNLNESLIDLQELGKYEQYIKWPWYIWLGFIAGLIAIVMVTIMLC
CMTSCCSCLKGCCSCGSCCKFDEDDSEPVLKGVKLHYT
SEQ ID NO 390: SEQ ID NO 195 + A942P + D614N + T572I +
S884C + A893C
MFVFLVLLPLVSSQCVNLTTRTQLPPAYTNSFTRGVYYPDKVFRSSVLHSTQDLFLPFFSNVTWF
HAIHVSGTNGTKRFDNPVLPFNDGVYFASTEKSNIIRGWIFGTTLDSKTQSLLIVNNATNVVIKV
CEFQFCNDPFLGVYYHKNNKSWMESEFRVYSSANNCTFEYVSQPFLMDLEGKQGNFKNLREFVFK
NIDGYFKIYSKHTPINLVRDLPQGFSALEPLVDLPIGINITRFQTLLALHRSYLTPGDSSSGWTA
GAAAYYVGYLQPRTFLLKYNENGTITDAVDCALDPLSETKCTLKSFTVEKGIYQTSNFRVQPTES
IVRFPNITNLCPFGEVFNATRFASVYAWNRKRISNCVADYSVLYNSASFSTFKCYGVSPTKLNDL
CFTNVYADSFVIRGDEVRQIAPGQTGKIADYNYKLPDDFTGCVIAWNSNNLDSKVGGNYNYLYRL
FRKSNLKPFERDISTEIYQAGSTPCNGVEGFNCYFPLQSYGFQPTNGVGYQPYRVVVLSFELLHA
PATVCGPKKSTNLVKNKCVNFNFNGLTGTGVLTESNKKFLPFQQFGRDIADITDAVRDPQTLEIL
DITPCSFGGVSVITPGTNTSNQVAVLYQNVNCTEVPVAIHADQLTPTWRVYSTGSNVFQTRAGCL
IGAEHVNNSYECDIPIGAGICASYQTQTNSPRRARSVASQSIIAYTMSLGAENSVAYSNNSIAIP
TNFTISVTTEILPVSMTKTSVDCTMYICGDSTECSNLLLQYGSFCTQLNRALTGIAVEQDKNTQE
VFAQVKQIYKTPPIKDFGGFNFSQILPDPSKPSKRSFIEDLLFNKVTLADAGFIKQYGDCLGDIA
ARDLICAQKFNGLTVLPPLLTDEMIAQYTSALLAGTITCGWTFGAGACLQIPFAMQMAYRFNGIG
VTQNVLYENQKLIANQFNSAIGKIQDSLSSTPSALGKLQDVVNQNAQALNTLVKQLSSNFGAISS
VLNDILSRLDPPEAEVQIDRLITGRLQSLQTYVTQQLIRAAEIRASANLAATKMSECVLGQSKRV
DFCGKGYHLMSFPQSAPHGVVFLHVTYVPAQEKNFTTAPAICHDGKAHFPREGVFVSNGTHWFVT
QRNFYEPQIITTDNTFVSGNCDVVIGIVNNTVYDPLQPELDSFKEELDKYFKNHTSPDVDLGDIS
GINASVVNIQKEIDRLNEVAKNLNESLIDLQELGKYEQYIKWPWYIWLGFIAGLIAIVMVTIMLC
CMTSCCSCLKGCCSCGSCCKFDEDDSEPVLKGVKLHYT
SEQ ID NO 391: SEQ ID NO 195 + A942P + D614N + N532P + G880C + F888C
MFVFLVLLPLVSSQCVNLTTRTQLPPAYTNSFTRGVYYPDKVFRSSVLHSTQDLFLPFFSNVTWF
HAIHVSGTNGTKRFDNPVLPFNDGVYFASTEKSNIIRGWIFGTTLDSKTQSLLIVNNATNVVIKV
CEFQFCNDPFLGVYYHKNNKSWMESEFRVYSSANNCTFEYVSQPFLMDLEGKQGNFKNLREFVFK
NIDGYFKIYSKHTPINLVRDLPQGFSALEPLVDLPIGINITRFQTLLALHRSYLTPGDSSSGWTA
GAAAYYVGYLQPRTFLLKYNENGTITDAVDCALDPLSETKCTLKSFTVEKGIYQTSNFRVQPTES
IVRFPNITNLCPFGEVFNATRFASVYAWNRKRISNCVADYSVLYNSASFSTFKCYGVSPTKLNDL
CFTNVYADSFVIRGDEVRQIAPGQTGKIADYNYKLPDDFTGCVIAWNSNNLDSKVGGNYNYLYRL
FRKSNLKPFERDISTEIYQAGSTPCNGVEGFNCYFPLQSYGFQPTNGVGYQPYRVVVLSFELLHA
PATVCGPKKSTPLVKNKCVNFNFNGLTGTGVLTESNKKFLPFQQFGRDIADTTDAVRDPQTLEIL
DITPCSFGGVSVITPGTNTSNQVAVLYQNVNCTEVPVAIHADQLTPTWRVYSTGSNVFQTRAGCL
IGAEHVNNSYECDIPIGAGICASYQTQTNSPRRARSVASQSIIAYTMSLGAENSVAYSNNSIAIP
TNFTISVTTEILPVSMTKTSVDCTMYICGDSTECSNLLLQYGSFCTQLNRALTGIAVEQDKNTQE
VFAQVKQIYKTPPIKDFGGFNFSQILPDPSKPSKRSFIEDLLFNKVTLADAGFIKQYGDCLGDIA
ARDLICAQKFNGLTVLPPLLTDEMIAQYTSALLACTITSGWTCGAGAALQIPFAMQMAYRFNGIG
VTQNVLYENQKLIANQFNSAIGKIQDSLSSTPSALGKLQDVVNQNAQALNTLVKQLSSNFGAISS
VLNDILSRLDPPEAEVQIDRLITGRLQSLQTYVTQQLIRAAEIRASANLAATKMSECVLGQSKRV
DFCGKGYHLMSFPQSAPHGVVFLHVTYVPAQEKNFTTAPAICHDGKAHFPREGVFVSNGTHWFVT
QRNFYEPQIITTDNTFVSGNCDVVIGIVNNTVYDPLQPELDSFKEELDKYFKNHTSPDVDLGDIS
GINASVVNIQKEIDRLNEVAKNLNESLIDLQELGKYEQYIKWPWYIWLGFIAGLIAIVMVTIMLC
CMTSCCSCLKGCCSCGSCCKFDEDDSEPVLKGVKLHYT
SEQ ID NO 392: SEQ ID NO 195 + A942P + D614N + N532P + S884C + A893C
MFVFLVLLPLVSSQCVNLTTRTQLPPAYTNSFTRGVYYPDKVFRSSVLHSTQDLFLPFFSNVTWF
HAIHVSGTNGTKRFDNPVLPFNDGVYFASTEKSNIIRGWIFGTTLDSKTQSLLIVNNATNVVIKV
CEFQFCNDPFLGVYYHKNNKSWMESEFRVYSSANNCTFEYVSQPFLMDLEGKQGNFKNLREFVFK
NIDGYFKIYSKHTPINLVRDLPQGFSALEPLVDLPIGINITRFQTLLALHRSYLTPGDSSSGWTA
GAAAYYVGYLQPRTFLLKYNENGTITDAVDCALDPLSETKCTLKSFTVEKGIYQTSNFRVQPTES
IVRFPNITNLCPFGEVFNATRFASVYAWNRKRISNCVADYSVLYNSASFSTFKCYGVSPTKLNDL
CFTNVYADSFVIRGDEVRQIAPGQTGKIADYNYKLPDDFTGCVIAWNSNNLDSKVGGNYNYLYRL
FRKSNLKPFERDISTEIYQAGSTPCNGVEGFNCYFPLQSYGFQPTNGVGYQPYRVVVLSFELLHA
PATVCGPKKSTPLVKNKCVNFNFNGLTGTGVLTESNKKFLPFQQFGRDIADTTDAVRDPQTLEIL
DITPCSFGGVSVITPGTNTSNQVAVLYQNVNCTEVPVAIHADQLTPTWRVYSTGSNVFQTRAGCL
IGAEHVNNSYECDIPIGAGICASYQTQTNSPRRARSVASQSIIAYTMSLGAENSVAYSNNSIAIP
TNFTISVTTEILPVSMTKTSVDCTMYICGDSTECSNLLLQYGSFCTQLNRALTGIAVEQDKNTQE
VFAQVKQIYKTPPIKDFGGFNFSQILPDPSKPSKRSFIEDLLFNKVTLADAGFIKQYGDCLGDIA
ARDLICAQKFNGLTVLPPLLTDEMIAQYTSALLAGTITCGWTFGAGACLQIPFAMQMAYRFNGIG
VTQNVLYENQKLIANQFNSAIGKIQDSLSSTPSALGKLQDVVNQNAQALNTLVKQLSSNFGAISS
VLNDILSRLDPPEAEVQIDRLITGRLQSLQTYVTQQLIRAAEIRASANLAATKMSECVLGQSKRV
DFCGKGYHLMSFPQSAPHGVVFLHVTYVPAQEKNFTTAPAICHDGKAHFPREGVFVSNGTHWFVT
QRNFYEPQIITTDNTFVSGNCDVVIGIVNNTVYDPLQPELDSFKEELDKYFKNHTSPDVDLGDIS
GINASVVNIQKEIDRLNEVAKNLNESLIDLQELGKYEQYIKWPWYIWLGFIAGLIAIVMVTIMLC
CMTSCCSCLKGCCSCGSCCKFDEDDSEPVLKGVKLHYT
SEQ ID NO 393: SEQ ID NO 195 + A942P + T572I +
N532P + G880C + F888C
MFVFLVLLPLVSSQCVNLTTRTQLPPAYTNSFTRGVYYPDKVFRSSVLHSTQDLFLPFFSNVTWF
HAIHVSGTNGTKRFDNPVLPFNDGVYFASTEKSNIIRGWIFGTTLDSKTQSLLIVNNATNVVIKV
CEFQFCNDPFLGVYYHKNNKSWMESEFRVYSSANNCTFEYVSQPFLMDLEGKQGNFKNLREFVFK
NIDGYFKIYSKHTPINLVRDLPQGFSALEPLVDLPIGINITRFQTLLALHRSYLTPGDSSSGWTA
GAAAYYVGYLQPRTFLLKYNENGTITDAVDCALDPLSETKCTLKSFTVEKGIYQTSNFRVQPTES
IVRFPNITNLCPFGEVFNATRFASVYAWNRKRISNCVADYSVLYNSASFSTFKCYGVSPTKLNDL
CFTNVYADSFVIRGDEVRQIAPGQTGKIADYNYKLPDDFTGCVIAWNSNNLDSKVGGNYNYLYRL
FRKSNLKPFERDISTEIYQAGSTPCNGVEGFNCYFPLQSYGFQPTNGVGYQPYRVVVLSFELLHA
PATVCGPKKSTPLVKNKCVNFNFNGLTGTGVLTESNKKFLPFQQFGRDIADITDAVRDPQTLEIL
DITPCSFGGVSVITPGTNTSNQVAVLYQDVNCTEVPVAIHADQLTPTWRVYSTGSNVFQTRAGCL
IGAEHVNNSYECDIPIGAGICASYQTQTNSPRRARSVASQSIIAYTMSLGAENSVAYSNNSIAIP
TNFTISVTTEILPVSMTKTSVDCTMYICGDSTECSNLLLQYGSFCTQLNRALTGIAVEQDKNTQE
VFAQVKQIYKTPPIKDFGGFNFSQILPDPSKPSKRSFIEDLLFNKVTLADAGFIKQYGDCLGDIA
ARDLICAQKFNGLTVLPPLLTDEMIAQYTSALLACTITSGWTCGAGAALQIPFAMQMAYRFNGIG
VTQNVLYENQKLIANQFNSAIGKIQDSLSSTPSALGKLQDVVNQNAQALNTLVKQLSSNFGAISS
VLNDILSRLDPPEAEVQIDRLITGRLQSLQTYVTQQLIRAAEIRASANLAATKMSECVLGQSKRV
DFCGKGYHLMSFPQSAPHGVVFLHVTYVPAQEKNFTTAPAICHDGKAHFPREGVFVSNGTHWFVT
QRNFYEPQIITTDNTFVSGNCDVVIGIVNNTVYDPLQPELDSFKEELDKYFKNHTSPDVDLGDIS
GINASVVNIQKEIDRLNEVAKNLNESLIDLQELGKYEQYIKWPWYIWLGFIAGLIAIVMVTIMLC
CMTSCCSCLKGCCSCGSCCKFDEDDSEPVLKGVKLHYT
SEQ ID NO 394: SEQ ID NO 195 + A942P + T572I +
N532P + S884C + A893C
MFVFLVLLPLVSSQCVNLTTRTQLPPAYTNSFTRGVYYPDKVFRSSVLHSTQDLFLPFFSNVTWF
HAIHVSGTNGTKRFDNPVLPFNDGVYFASTEKSNIIRGWIFGTTLDSKTQSLLIVNNATNVVIKV
CEFQFCNDPFLGVYYHKNNKSWMESEFRVYSSANNCTFEYVSQPFLMDLEGKQGNFKNLREFVFK
NIDGYFKIYSKHTPINLVRDLPQGFSALEPLVDLPIGINITRFQTLLALHRSYLTPGDSSSGWTA
GAAAYYVGYLQPRTFLLKYNENGTITDAVDCALDPLSETKCTLKSFTVEKGIYQTSNFRVQPTES
IVRFPNITNLCPFGEVFNATRFASVYAWNRKRISNCVADYSVLYNSASFSTFKCYGVSPTKLNDL
CFTNVYADSFVIRGDEVRQIAPGQTGKIADYNYKLPDDFTGCVIAWNSNNLDSKVGGNYNYLYRL
FRKSNLKPFERDISTEIYQAGSTPCNGVEGFNCYFPLQSYGFQPTNGVGYQPYRVVVLSFELLHA
PATVCGPKKSTPLVKNKCVNFNFNGLTGTGVLTESNKKFLPFQQFGRDIADITDAVRDPQTLEIL
DITPCSFGGVSVITPGTNTSNQVAVLYQDVNCTEVPVAIHADQLTPTWRVYSTGSNVFQTRAGCL
IGAEHVNNSYECDIPIGAGICASYQTQTNSPRRARSVASQSIIAYTMSLGAENSVAYSNNSIAIP
TNFTISVTTEILPVSMTKTSVDCTMYICGDSTECSNLLLQYGSFCTQLNRALTGIAVEQDKNTQE
VFAQVKQIYKTPPIKDFGGFNFSQILPDPSKPSKRSFIEDLLFNKVTLADAGFIKQYGDCLGDIA
ARDLICAQKFNGLTVLPPLLTDEMIAQYTSALLAGTITCGWTFGAGACLQIPFAMQMAYRFNGIG
VTQNVLYENQKLIANQFNSAIGKIQDSLSSTPSALGKLQDVVNQNAQALNTLVKQLSSNFGAISS
VLNDILSRLDPPEAEVQIDRLITGRLQSLQTYVTQQLIRAAEIRASANLAATKMSECVLGQSKRV
DFCGKGYHLMSFPQSAPHGVVFLHVTYVPAQEKNFTTAPAICHDGKAHFPREGVFVSNGTHWFVT
QRNFYEPQIITTDNTFVSGNCDVVIGIVNNTVYDPLQPELDSFKEELDKYFKNHTSPDVDLGDIS
GINASVVNIQKEIDRLNEVAKNLNESLIDLQELGKYEQYIKWPWYIWLGFIAGLIAIVMVTIMLC
CMTSCCSCLKGCCSCGSCCKFDEDDSEPVLKGVKLHYT
SEQ ID NO 395: SEQ ID NO 195 + A892P + D614N + T572I +
N532P
MFVFLVLLPLVSSQCVNLTTRTQLPPAYTNSFTRGVYYPDKVFRSSVLHSTQDLFLPFFSNVTWF
HAIHVSGTNGTKRFDNPVLPFNDGVYFASTEKSNIIRGWIFGTTLDSKTQSLLIVNNATNVVIKV
CEFQFCNDPFLGVYYHKNNKSWMESEFRVYSSANNCTFEYVSQPFLMDLEGKQGNFKNLREFVFK
NIDGYFKIYSKHTPINLVRDLPQGFSALEPLVDLPIGINITRFQTLLALHRSYLTPGDSSSGWTA
GAAAYYVGYLQPRTFLLKYNENGTITDAVDCALDPLSETKCTLKSFTVEKGIYQTSNFRVQPTES
IVRFPNITNLCPFGEVFNATRFASVYAWNRKRISNCVADYSVLYNSASFSTFKCYGVSPTKLNDL
CFTNVYADSFVIRGDEVRQIAPGQTGKIADYNYKLPDDFTGCVIAWNSNNLDSKVGGNYNYLYRL
FRKSNLKPFERDISTEIYQAGSTPCNGVEGFNCYFPLQSYGFQPTNGVGYQPYRVVVLSFELLHA
PATVCGPKKSTPLVKNKCVNFNFNGLTGTGVLTESNKKFLPFQQFGRDIADITDAVRDPQTLEIL
DITPCSFGGVSVITPGTNTSNQVAVLYQNVNCTEVPVAIHADQLTPTWRVYSTGSNVFQTRAGCL
IGAEHVNNSYECDIPIGAGICASYQTQTNSPRRARSVASQSIIAYTMSLGAENSVAYSNNSIAIP
TNFTISVTTEILPVSMTKTSVDCTMYICGDSTECSNLLLQYGSFCTQLNRALTGIAVEQDKNTQE
VFAQVKQIYKTPPIKDFGGFNFSQILPDPSKPSKRSFIEDLLFNKVTLADAGFIKQYGDCLGDIA
ARDLICAQKFNGLTVLPPLLTDEMIAQYTSALLAGTITSGWTFGAGPALQIPFAMQMAYRFNGIG
VTQNVLYENQKLIANQFNSAIGKIQDSLSSTASALGKLQDVVNQNAQALNTLVKQLSSNFGAISS
VLNDILSRLDPPEAEVQIDRLITGRLQSLQTYVTQQLIRAAEIRASANLAATKMSECVLGQSKRV
DFCGKGYHLMSFPQSAPHGVVFLHVTYVPAQEKNFTTAPAICHDGKAHFPREGVFVSNGTHWFVT
QRNFYEPQIITTDNTFVSGNCDVVIGIVNNTVYDPLQPELDSFKEELDKYFKNHTSPDVDLGDIS
GINASVVNIQKEIDRLNEVAKNLNESLIDLQELGKYEQYIKWPWYIWLGFIAGLIAIVMVTIMLC
CMTSCCSCLKGCCSCGSCCKFDEDDSEPVLKGVKLHYT
SEQ ID NO 396: SEQ ID NO 195 + A892P + D614N + T572I +
G880C + F888C
MFVFLVLLPLVSSQCVNLTTRTQLPPAYTNSFTRGVYYPDKVFRSSVLHSTQDLFLPFFSNVTWF
HAIHVSGTNGTKRFDNPVLPFNDGVYFASTEKSNIIRGWIFGTTLDSKTQSLLIVNNATNVVIKV
CEFQFCNDPFLGVYYHKNNKSWMESEFRVYSSANNCTFEYVSQPFLMDLEGKQGNFKNLREFVFK
NIDGYFKIYSKHTPINLVRDLPQGFSALEPLVDLPIGINITRFQTLLALHRSYLTPGDSSSGWTA
GAAAYYVGYLQPRTFLLKYNENGTITDAVDCALDPLSETKCTLKSFTVEKGIYQTSNFRVQPTES
IVRFPNITNLCPFGEVFNATRFASVYAWNRKRISNCVADYSVLYNSASFSTFKCYGVSPTKLNDL
CFTNVYADSFVIRGDEVRQIAPGQTGKIADYNYKLPDDFTGCVIAWNSNNLDSKVGGNYNYLYRL
FRKSNLKPFERDISTEIYQAGSTPCNGVEGFNCYFPLQSYGFQPTNGVGYQPYRVVVLSFELLHA
PATVCGPKKSTNLVKNKCVNFNFNGLTGTGVLTESNKKFLPFQQFGRDIADITDAVRDPQTLEIL
DITPCSFGGVSVITPGTNTSNQVAVLYQNVNCTEVPVAIHADQLTPTWRVYSTGSNVFQTRAGCL
IGAEHVNNSYECDIPIGAGICASYQTQTNSPRRARSVASQSIIAYTMSLGAENSVAYSNNSIAIP
TNFTISVTTEILPVSMTKTSVDCTMYICGDSTECSNLLLQYGSFCTQLNRALTGIAVEQDKNTQE
VFAQVKQIYKTPPIKDFGGFNFSQILPDPSKPSKRSFIEDLLFNKVTLADAGFIKQYGDCLGDIA
ARDLICAQKFNGLTVLPPLLTDEMIAQYTSALLACTITSGWTCGAGPALQIPFAMQMAYRFNGIG
VTQNVLYENQKLIANQFNSAIGKIQDSLSSTASALGKLQDVVNQNAQALNTLVKQLSSNFGAISS
VLNDILSRLDPPEAEVQIDRLITGRLQSLQTYVTQQLIRAAEIRASANLAATKMSECVLGQSKRV
DFCGKGYHLMSFPQSAPHGVVFLHVTYVPAQEKNFTTAPAICHDGKAHFPREGVFVSNGTHWFVT
QRNFYEPQIITTDNTFVSGNCDVVIGIVNNTVYDPLQPELDSFKEELDKYFKNHTSPDVDLGDIS
GINASVVNIQKEIDRLNEVAKNLNESLIDLQELGKYEQYIKWPWYIWLGFIAGLIAIVMVTIMLC
CMTSCCSCLKGCCSCGSCCKFDEDDSEPVLKGVKLHYT
SEQ ID NO 397: SEQ ID NO 195 + A892P + D614N + T572I +
S884C + A893C
MFVFLVLLPLVSSQCVNLTTRTQLPPAYTNSFTRGVYYPDKVFRSSVLHSTQDLFLPFFSNVTWF
HAIHVSGTNGTKRFDNPVLPFNDGVYFASTEKSNIIRGWIFGTTLDSKTQSLLIVNNATNVVIKV
CEFQFCNDPFLGVYYHKNNKSWMESEFRVYSSANNCTFEYVSQPFLMDLEGKQGNFKNLREFVFK
NIDGYFKIYSKHTPINLVRDLPQGFSALEPLVDLPIGINITRFQTLLALHRSYLTPGDSSSGWTA
GAAAYYVGYLQPRTFLLKYNENGTITDAVDCALDPLSETKCTLKSFTVEKGIYQTSNFRVQPTES
IVRFPNITNLCPFGEVFNATRFASVYAWNRKRISNCVADYSVLYNSASFSTFKCYGVSPTKLNDL
CFTNVYADSFVIRGDEVRQIAPGQTGKIADYNYKLPDDFTGCVIAWNSNNLDSKVGGNYNYLYRL
FRKSNLKPFERDISTEIYQAGSTPCNGVEGFNCYFPLQSYGFQPTNGVGYQPYRVVVLSFELLHA
PATVCGPKKSTNLVKNKCVNFNFNGLTGTGVLTESNKKFLPFQQFGRDIADITDAVRDPQTLEIL
DITPCSFGGVSVITPGTNTSNQVAVLYQNVNCTEVPVAIHADQLTPTWRVYSTGSNVFQTRAGCL
IGAEHVNNSYECDIPIGAGICASYQTQTNSPRRARSVASQSIIAYTMSLGAENSVAYSNNSIAIP
TNFTISVTTEILPVSMTKTSVDCTMYICGDSTECSNLLLQYGSFCTQLNRALTGIAVEQDKNTQE
VFAQVKQIYKTPPIKDFGGFNFSQILPDPSKPSKRSFIEDLLFNKVTLADAGFIKQYGDCLGDIA
ARDLICAQKFNGLTVLPPLLTDEMIAQYTSALLAGTITCGWTFGAGPCLQIPFAMQMAYRFNGIG
VTQNVLYENQKLIANQFNSAIGKIQDSLSSTASALGKLQDVVNQNAQALNTLVKQLSSNFGAISS
VLNDILSRLDPPEAEVQIDRLITGRLQSLQTYVTQQLIRAAEIRASANLAATKMSECVLGQSKRV
DFCGKGYHLMSFPQSAPHGVVFLHVTYVPAQEKNFTTAPAICHDGKAHFPREGVFVSNGTHWFVT
QRNFYEPQIITTDNTFVSGNCDVVIGIVNNTVYDPLQPELDSFKEELDKYFKNHTSPDVDLGDIS
GINASVVNIQKEIDRLNEVAKNLNESLIDLQELGKYEQYIKWPWYIWLGFIAGLIAIVMVTIMLC
CMTSCCSCLKGCCSCGSCCKFDEDDSEPVLKGVKLHYT
SEQ ID NO 398: SEQ ID NO 195 + A892P + D614N + N532P +
G880C + F888C
MFVFLVLLPLVSSQCVNLTTRTQLPPAYTNSFTRGVYYPDKVFRSSVLHSTQDLFLPFFSNVTWF
HAIHVSGTNGTKRFDNPVLPFNDGVYFASTEKSNIIRGWIFGTTLDSKTQSLLIVNNATNVVIKV
CEFQFCNDPFLGVYYHKNNKSWMESEFRVYSSANNCTFEYVSQPFLMDLEGKQGNFKNLREFVFK
NIDGYFKIYSKHTPINLVRDLPQGFSALEPLVDLPIGINITRFQTLLALHRSYLTPGDSSSGWTA
GAAAYYVGYLQPRTFLLKYNENGTITDAVDCALDPLSETKCTLKSFTVEKGIYQTSNFRVQPTES
IVRFPNITNLCPFGEVFNATRFASVYAWNRKRISNCVADYSVLYNSASFSTFKCYGVSPTKLNDL
CFTNVYADSFVIRGDEVRQIAPGQTGKIADYNYKLPDDFTGCVIAWNSNNLDSKVGGNYNYLYRL
FRKSNLKPFERDISTEIYQAGSTPCNGVEGFNCYFPLQSYGFQPTNGVGYQPYRVVVLSFELLHA
PATVCGPKKSTPLVKNKCVNFNFNGLTGTGVLTESNKKFLPFQQFGRDIADTTDAVRDPQTLEIL
DITPCSFGGVSVITPGTNTSNQVAVLYQNVNCTEVPVAIHADQLTPTWRVYSTGSNVFQTRAGCL
IGAEHVNNSYECDIPIGAGICASYQTQTNSPRRARSVASQSIIAYTMSLGAENSVAYSNNSIAIP
TNFTISVTTEILPVSMTKTSVDCTMYICGDSTECSNLLLQYGSFCTQLNRALTGIAVEQDKNTQE
VFAQVKQIYKTPPIKDFGGFNFSQILPDPSKPSKRSFIEDLLFNKVTLADAGFIKQYGDCLGDIA
ARDLICAQKFNGLTVLPPLLTDEMIAQYTSALLACTITSGWTCGAGPALQIPFAMQMAYRFNGIG
VTQNVLYENQKLIANQFNSAIGKIQDSLSSTASALGKLQDVVNQNAQALNTLVKQLSSNFGAISS
VLNDILSRLDPPEAEVQIDRLITGRLQSLQTYVTQQLIRAAEIRASANLAATKMSECVLGQSKRV
DFCGKGYHLMSFPQSAPHGVVFLHVTYVPAQEKNFTTAPAICHDGKAHFPREGVFVSNGTHWFVT
QRNFYEPQIITTDNTFVSGNCDVVIGIVNNTVYDPLQPELDSFKEELDKYFKNHTSPDVDLGDIS
GINASVVNIQKEIDRLNEVAKNLNESLIDLQELGKYEQYIKWPWYIWLGFIAGLIAIVMVTIMLC
CMTSCCSCLKGCCSCGSCCKFDEDDSEPVLKGVKLHYT
SEQ ID NO 399: SEQ ID NO 195 + A892P + D614N + N532P +
S884C + A893C
MFVFLVLLPLVSSQCVNLTTRTQLPPAYTNSFTRGVYYPDKVFRSSVLHSTQDLFLPFFSNVTWF
HAIHVSGTNGTKRFDNPVLPFNDGVYFASTEKSNIIRGWIFGTTLDSKTQSLLIVNNATNVVIKV
CEFQFCNDPFLGVYYHKNNKSWMESEFRVYSSANNCTFEYVSQPFLMDLEGKQGNFKNLREFVFK
NIDGYFKIYSKHTPINLVRDLPQGFSALEPLVDLPIGINITRFQTLLALHRSYLTPGDSSSGWTA
GAAAYYVGYLQPRTFLLKYNENGTITDAVDCALDPLSETKCTLKSFTVEKGIYQTSNFRVQPTES
IVRFPNITNLCPFGEVFNATRFASVYAWNRKRISNCVADYSVLYNSASFSTFKCYGVSPTKLNDL
CFTNVYADSFVIRGDEVRQIAPGQTGKIADYNYKLPDDFTGCVIAWNSNNLDSKVGGNYNYLYRL
FRKSNLKPFERDISTEIYQAGSTPCNGVEGFNCYFPLQSYGFQPTNGVGYQPYRVVVLSFELLHA
PATVCGPKKSTPLVKNKCVNFNFNGLTGTGVLTESNKKFLPFQQFGRDIADTTDAVRDPQTLEIL
DITPCSFGGVSVITPGTNTSNQVAVLYQNVNCTEVPVAIHADQLTPTWRVYSTGSNVFQTRAGCL
IGAEHVNNSYECDIPIGAGICASYQTQTNSPRRARSVASQSIIAYTMSLGAENSVAYSNNSIAIP
TNFTISVTTEILPVSMTKTSVDCTMYICGDSTECSNLLLQYGSFCTQLNRALTGIAVEQDKNTQE
VFAQVKQIYKTPPIKDFGGFNFSQILPDPSKPSKRSFIEDLLFNKVTLADAGFIKQYGDCLGDIA
ARDLICAQKFNGLTVLPPLLTDEMIAQYTSALLAGTITCGWTFGAGPCLQIPFAMQMAYRFNGIG
VTQNVLYENQKLIANQFNSAIGKIQDSLSSTASALGKLQDVVNQNAQALNTLVKQLSSNFGAISS
VLNDILSRLDPPEAEVQIDRLITGRLQSLQTYVTQQLIRAAEIRASANLAATKMSECVLGQSKRV
DFCGKGYHLMSFPQSAPHGVVFLHVTYVPAQEKNFTTAPAICHDGKAHFPREGVFVSNGTHWFVT
QRNFYEPQIITTDNTFVSGNCDVVIGIVNNTVYDPLQPELDSFKEELDKYFKNHTSPDVDLGDIS
GINASVVNIQKEIDRLNEVAKNLNESLIDLQELGKYEQYIKWPWYIWLGFIAGLIAIVMVTIMLC
CMTSCCSCLKGCCSCGSCCKFDEDDSEPVLKGVKLHYT
SEQ ID NO 400: SEQ ID NO 195 + A892P + T572I +
N532P + G880C + F888C
MFVFLVLLPLVSSQCVNLTTRTQLPPAYTNSFTRGVYYPDKVFRSSVLHSTQDLFLPFFSNVTWF
HAIHVSGTNGTKRFDNPVLPFNDGVYFASTEKSNIIRGWIFGTTLDSKTQSLLIVNNATNVVIKV
CEFQFCNDPFLGVYYHKNNKSWMESEFRVYSSANNCTFEYVSQPFLMDLEGKQGNFKNLREFVFK
NIDGYFKIYSKHTPINLVRDLPQGFSALEPLVDLPIGINITRFQTLLALHRSYLTPGDSSSGWTA
GAAAYYVGYLQPRTFLLKYNENGTITDAVDCALDPLSETKCTLKSFTVEKGIYQTSNFRVQPTES
IVRFPNITNLCPFGEVFNATRFASVYAWNRKRISNCVADYSVLYNSASFSTFKCYGVSPTKLNDL
CFTNVYADSFVIRGDEVRQIAPGQTGKIADYNYKLPDDFTGCVIAWNSNNLDSKVGGNYNYLYRL
FRKSNLKPFERDISTEIYQAGSTPCNGVEGFNCYFPLQSYGFQPTNGVGYQPYRVVVLSFELLHA
PATVCGPKKSTPLVKNKCVNFNFNGLTGTGVLTESNKKFLPFQQFGRDIADITDAVRDPQTLEIL
DITPCSFGGVSVITPGTNTSNQVAVLYQDVNCTEVPVAIHADQLTPTWRVYSTGSNVFQTRAGCL
IGAEHVNNSYECDIPIGAGICASYQTQTNSPRRARSVASQSIIAYTMSLGAENSVAYSNNSIAIP
TNFTISVTTEILPVSMTKTSVDCTMYICGDSTECSNLLLQYGSFCTQLNRALTGIAVEQDKNTQE
VFAQVKQIYKTPPIKDFGGFNFSQILPDPSKPSKRSFIEDLLFNKVTLADAGFIKQYGDCLGDIA
ARDLICAQKFNGLTVLPPLLTDEMIAQYTSALLACTITSGWTCGAGPALQIPFAMQMAYRFNGIG
VTQNVLYENQKLIANQFNSAIGKIQDSLSSTASALGKLQDVVNQNAQALNTLVKQLSSNFGAISS
VLNDILSRLDPPEAEVQIDRLITGRLQSLQTYVTQQLIRAAEIRASANLAATKMSECVLGQSKRV
DFCGKGYHLMSFPQSAPHGVVFLHVTYVPAQEKNFTTAPAICHDGKAHFPREGVFVSNGTHWFVT
QRNFYEPQIITTDNTFVSGNCDVVIGIVNNTVYDPLQPELDSFKEELDKYFKNHTSPDVDLGDIS
GINASVVNIQKEIDRLNEVAKNLNESLIDLQELGKYEQYIKWPWYIWLGFIAGLIAIVMVTIMLC
CMTSCCSCLKGCCSCGSCCKFDEDDSEPVLKGVKLHYT
SEQ ID NO 401: SEQ ID NO 195 + A892P + T572I +
N532P + S884C + A893C
MFVFLVLLPLVSSQCVNLTTRTQLPPAYTNSFTRGVYYPDKVFRSSVLHSTQDLFLPFFSNVTWF
HAIHVSGTNGTKRFDNPVLPFNDGVYFASTEKSNIIRGWIFGTTLDSKTQSLLIVNNATNVVIKV
CEFQFCNDPFLGVYYHKNNKSWMESEFRVYSSANNCTFEYVSQPFLMDLEGKQGNFKNLREFVFK
NIDGYFKIYSKHTPINLVRDLPQGFSALEPLVDLPIGINITRFQTLLALHRSYLTPGDSSSGWTA
GAAAYYVGYLQPRTFLLKYNENGTITDAVDCALDPLSETKCTLKSFTVEKGIYQTSNFRVQPTES
IVRFPNITNLCPFGEVFNATRFASVYAWNRKRISNCVADYSVLYNSASFSTFKCYGVSPTKLNDL
CFTNVYADSFVIRGDEVRQIAPGQTGKIADYNYKLPDDFTGCVIAWNSNNLDSKVGGNYNYLYRL
FRKSNLKPFERDISTEIYQAGSTPCNGVEGFNCYFPLQSYGFQPTNGVGYQPYRVVVLSFELLHA
PATVCGPKKSTPLVKNKCVNFNFNGLTGTGVLTESNKKFLPFQQFGRDIADITDAVRDPQTLEIL
DITPCSFGGVSVITPGTNTSNQVAVLYQDVNCTEVPVAIHADQLTPTWRVYSTGSNVFQTRAGCL
IGAEHVNNSYECDIPIGAGICASYQTQTNSPRRARSVASQSIIAYTMSLGAENSVAYSNNSIAIP
TNFTISVTTEILPVSMTKTSVDCTMYICGDSTECSNLLLQYGSFCTQLNRALTGIAVEQDKNTQE
VFAQVKQIYKTPPIKDFGGFNFSQILPDPSKPSKRSFIEDLLFNKVTLADAGFIKQYGDCLGDIA
ARDLICAQKFNGLTVLPPLLTDEMIAQYTSALLAGTITCGWTFGAGPCLQIPFAMQMAYRFNGIG
VTQNVLYENQKLIANQFNSAIGKIQDSLSSTASALGKLQDVVNQNAQALNTLVKQLSSNFGAISS
VLNDILSRLDPPEAEVQIDRLITGRLQSLQTYVTQQLIRAAEIRASANLAATKMSECVLGQSKRV
DFCGKGYHLMSFPQSAPHGVVFLHVTYVPAQEKNFTTAPAICHDGKAHFPREGVFVSNGTHWFVT
QRNFYEPQIITTDNTFVSGNCDVVIGIVNNTVYDPLQPELDSFKEELDKYFKNHTSPDVDLGDIS
GINASVVNIQKEIDRLNEVAKNLNESLIDLQELGKYEQYIKWPWYIWLGFIAGLIAIVMVTIMLC
CMTSCCSCLKGCCSCGSCCKFDEDDSEPVLKGVKLHYT
SEQ ID NO 402: SEQ ID NO 195 + D614N + T572I +
N532P + G880C + F888C
MFVFLVLLPLVSSQCVNLTTRTQLPPAYTNSFTRGVYYPDKVFRSSVLHSTQDLFLPFFSNVTWF
HAIHVSGTNGTKRFDNPVLPFNDGVYFASTEKSNIIRGWIFGTTLDSKTQSLLIVNNATNVVIKV
CEFQFCNDPFLGVYYHKNNKSWMESEFRVYSSANNCTFEYVSQPFLMDLEGKQGNFKNLREFVFK
NIDGYFKIYSKHTPINLVRDLPQGFSALEPLVDLPIGINITRFQTLLALHRSYLTPGDSSSGWTA
GAAAYYVGYLQPRTFLLKYNENGTITDAVDCALDPLSETKCTLKSFTVEKGIYQTSNFRVQPTES
IVRFPNITNLCPFGEVFNATRFASVYAWNRKRISNCVADYSVLYNSASFSTFKCYGVSPTKLNDL
CFTNVYADSFVIRGDEVRQIAPGQTGKIADYNYKLPDDFTGCVIAWNSNNLDSKVGGNYNYLYRL
FRKSNLKPFERDISTEIYQAGSTPCNGVEGFNCYFPLQSYGFQPTNGVGYQPYRVVVLSFELLHA
PATVCGPKKSTPLVKNKCVNFNFNGLTGTGVLTESNKKFLPFQQFGRDIADITDAVRDPQTLEIL
DITPCSFGGVSVITPGTNTSNQVAVLYQNVNCTEVPVAIHADQLTPTWRVYSTGSNVFQTRAGCL
IGAEHVNNSYECDIPIGAGICASYQTQTNSPRRARSVASQSIIAYTMSLGAENSVAYSNNSIAIP
TNFTISVTTEILPVSMTKTSVDCTMYICGDSTECSNLLLQYGSFCTQLNRALTGIAVEQDKNTQE
VFAQVKQIYKTPPIKDFGGFNFSQILPDPSKPSKRSFIEDLLFNKVTLADAGFIKQYGDCLGDIA
ARDLICAQKFNGLTVLPPLLTDEMIAQYTSALLACTITSGWTCGAGAALQIPFAMQMAYRFNGIG
VTQNVLYENQKLIANQFNSAIGKIQDSLSSTASALGKLQDVVNQNAQALNTLVKQLSSNFGAISS
VLNDILSRLDPPEAEVQIDRLITGRLQSLQTYVTQQLIRAAEIRASANLAATKMSECVLGQSKRV
DFCGKGYHLMSFPQSAPHGVVFLHVTYVPAQEKNFTTAPAICHDGKAHFPREGVFVSNGTHWFVT
QRNFYEPQIITTDNTFVSGNCDVVIGIVNNTVYDPLQPELDSFKEELDKYFKNHTSPDVDLGDIS
GINASVVNIQKEIDRLNEVAKNLNESLIDLQELGKYEQYIKWPWYIWLGFIAGLIAIVMVTIMLC
CMTSCCSCLKGCCSCGSCCKFDEDDSEPVLKGVKLHYT
SEQ ID NO 403: SEQ ID NO 195 + D614N + T572I +
N532P + S884C + A893C
MFVFLVLLPLVSSQCVNLTTRTQLPPAYTNSFTRGVYYPDKVFRSSVLHSTQDLFLPFFSNVTWF
HAIHVSGTNGTKRFDNPVLPFNDGVYFASTEKSNIIRGWIFGTTLDSKTQSLLIVNNATNVVIKV
CEFQFCNDPFLGVYYHKNNKSWMESEFRVYSSANNCTFEYVSQPFLMDLEGKQGNFKNLREFVFK
NIDGYFKIYSKHTPINLVRDLPQGFSALEPLVDLPIGINITRFQTLLALHRSYLTPGDSSSGWTA
GAAAYYVGYLQPRTFLLKYNENGTITDAVDCALDPLSETKCTLKSFTVEKGIYQTSNFRVQPTES
IVRFPNITNLCPFGEVFNATRFASVYAWNRKRISNCVADYSVLYNSASFSTFKCYGVSPTKLNDL
CFTNVYADSFVIRGDEVRQIAPGQTGKIADYNYKLPDDFTGCVIAWNSNNLDSKVGGNYNYLYRL
FRKSNLKPFERDISTEIYQAGSTPCNGVEGFNCYFPLQSYGFQPTNGVGYQPYRVVVLSFELLHA
PATVCGPKKSTPLVKNKCVNFNFNGLTGTGVLTESNKKFLPFQQFGRDIADITDAVRDPQTLEIL
DITPCSFGGVSVITPGTNTSNQVAVLYQNVNCTEVPVAIHADQLTPTWRVYSTGSNVFQTRAGCL
IGAEHVNNSYECDIPIGAGICASYQTQTNSPRRARSVASQSIIAYTMSLGAENSVAYSNNSIAIP
TNFTISVTTEILPVSMTKTSVDCTMYICGDSTECSNLLLQYGSFCTQLNRALTGIAVEQDKNTQE
VFAQVKQIYKTPPIKDFGGFNFSQILPDPSKPSKRSFIEDLLFNKVTLADAGFIKQYGDCLGDIA
ARDLICAQKFNGLTVLPPLLTDEMIAQYTSALLAGTITCGWTFGAGACLQIPFAMQMAYRFNGIG
VTQNVLYENQKLIANQFNSAIGKIQDSLSSTASALGKLQDVVNQNAQALNTLVKQLSSNFGAISS
VLNDILSRLDPPEAEVQIDRLITGRLQSLQTYVTQQLIRAAEIRASANLAATKMSECVLGQSKRV
DFCGKGYHLMSFPQSAPHGVVFLHVTYVPAQEKNFTTAPAICHDGKAHFPREGVFVSNGTHWFVT
QRNFYEPQIITTDNTFVSGNCDVVIGIVNNTVYDPLQPELDSFKEELDKYFKNHTSPDVDLGDIS
GINASVVNIQKEIDRLNEVAKNLNESLIDLQELGKYEQYIKWPWYIWLGFIAGLIAIVMVTIMLC
CMTSCCSCLKGCCSCGSCCKFDEDDSEPVLKGVKLHYT
SEQ ID NO 404: SEQ ID NO 195 + A942P + A892P + D614N + T572I +
N532P
MFVFLVLLPLVSSQCVNLTTRTQLPPAYTNSFTRGVYYPDKVFRSSVLHSTQDLFLPFFSNVTWF
HAIHVSGTNGTKRFDNPVLPFNDGVYFASTEKSNIIRGWIFGTTLDSKTQSLLIVNNATNVVIKV
CEFQFCNDPFLGVYYHKNNKSWMESEFRVYSSANNCTFEYVSQPFLMDLEGKQGNFKNLREFVFK
NIDGYFKIYSKHTPINLVRDLPQGFSALEPLVDLPIGINITRFQTLLALHRSYLTPGDSSSGWTA
GAAAYYVGYLQPRTFLLKYNENGTITDAVDCALDPLSETKCTLKSFTVEKGIYQTSNFRVQPTES
IVRFPNITNLCPFGEVFNATRFASVYAWNRKRISNCVADYSVLYNSASFSTFKCYGVSPTKLNDL
CFTNVYADSFVIRGDEVRQIAPGQTGKIADYNYKLPDDFTGCVIAWNSNNLDSKVGGNYNYLYRL
FRKSNLKPFERDISTEIYQAGSTPCNGVEGFNCYFPLQSYGFQPTNGVGYQPYRVVVLSFELLHA
PATVCGPKKSTPLVKNKCVNFNFNGLTGTGVLTESNKKFLPFQQFGRDIADITDAVRDPQTLEIL
DITPCSFGGVSVITPGTNTSNQVAVLYQNVNCTEVPVAIHADQLTPTWRVYSTGSNVFQTRAGCL
IGAEHVNNSYECDIPIGAGICASYQTQTNSPRRARSVASQSIIAYTMSLGAENSVAYSNNSIAIP
TNFTISVTTEILPVSMTKTSVDCTMYICGDSTECSNLLLQYGSFCTQLNRALTGIAVEQDKNTQE
VFAQVKQIYKTPPIKDFGGFNFSQILPDPSKPSKRSFIEDLLFNKVTLADAGFIKQYGDCLGDIA
ARDLICAQKFNGLTVLPPLLTDEMIAQYTSALLAGTITSGWTFGAGPALQIPFAMQMAYRFNGIG
VTQNVLYENQKLIANQFNSAIGKIQDSLSSTPSALGKLQDVVNQNAQALNTLVKQLSSNFGAISS
VLNDILSRLDPPEAEVQIDRLITGRLQSLQTYVTQQLIRAAEIRASANLAATKMSECVLGQSKRV
DFCGKGYHLMSFPQSAPHGVVFLHVTYVPAQEKNFTTAPAICHDGKAHFPREGVFVSNGTHWFVT
QRNFYEPQIITTDNTFVSGNCDVVIGIVNNTVYDPLQPELDSFKEELDKYFKNHTSPDVDLGDIS
GINASVVNIQKEIDRLNEVAKNLNESLIDLQELGKYEQYIKWPWYIWLGFIAGLIAIVMVTIMLC
CMTSCCSCLKGCCSCGSCCKFDEDDSEPVLKGVKLHYT
SEQ ID NO 405: SEQ ID NO 195 + A942P + A892P + D614N + T572I +
G880C + F888C
MFVFLVLLPLVSSQCVNLTTRTQLPPAYTNSFTRGVYYPDKVFRSSVLHSTQDLFLPFFSNVTWF
HAIHVSGTNGTKRFDNPVLPFNDGVYFASTEKSNIIRGWIFGTTLDSKTQSLLIVNNATNVVIKV
CEFQFCNDPFLGVYYHKNNKSWMESEFRVYSSANNCTFEYVSQPFLMDLEGKQGNFKNLREFVFK
NIDGYFKIYSKHTPINLVRDLPQGFSALEPLVDLPIGINITRFQTLLALHRSYLTPGDSSSGWTA
GAAAYYVGYLQPRTFLLKYNENGTITDAVDCALDPLSETKCTLKSFTVEKGIYQTSNFRVQPTES
IVRFPNITNLCPFGEVFNATRFASVYAWNRKRISNCVADYSVLYNSASFSTFKCYGVSPTKLNDL
CFTNVYADSFVIRGDEVRQIAPGQTGKIADYNYKLPDDFTGCVIAWNSNNLDSKVGGNYNYLYRL
FRKSNLKPFERDISTEIYQAGSTPCNGVEGFNCYFPLQSYGFQPTNGVGYQPYRVVVLSFELLHA
PATVCGPKKSTNLVKNKCVNFNFNGLTGTGVLTESNKKFLPFQQFGRDIADITDAVRDPQTLEIL
DITPCSFGGVSVITPGTNTSNQVAVLYQNVNCTEVPVAIHADQLTPTWRVYSTGSNVFQTRAGCL
IGAEHVNNSYECDIPIGAGICASYQTQTNSPRRARSVASQSIIAYTMSLGAENSVAYSNNSIAIP
TNFTISVTTEILPVSMTKTSVDCTMYICGDSTECSNLLLQYGSFCTQLNRALTGIAVEQDKNTQE
VFAQVKQIYKTPPIKDFGGFNFSQILPDPSKPSKRSFIEDLLFNKVTLADAGFIKQYGDCLGDIA
ARDLICAQKFNGLTVLPPLLTDEMIAQYTSALLACTITSGWTCGAGPALQIPFAMQMAYRFNGIG
VTQNVLYENQKLIANQFNSAIGKIQDSLSSTPSALGKLQDVVNQNAQALNTLVKQLSSNFGAISS
VLNDILSRLDPPEAEVQIDRLITGRLQSLQTYVTQQLIRAAEIRASANLAATKMSECVLGQSKRV
DFCGKGYHLMSFPQSAPHGVVFLHVTYVPAQEKNFTTAPAICHDGKAHFPREGVFVSNGTHWFVT
QRNFYEPQIITTDNTFVSGNCDVVIGIVNNTVYDPLQPELDSFKEELDKYFKNHTSPDVDLGDIS
GINASVVNIQKEIDRLNEVAKNLNESLIDLQELGKYEQYIKWPWYIWLGFIAGLIAIVMVTIMLC
CMTSCCSCLKGCCSCGSCCKFDEDDSEPVLKGVKLHYT
SEQ ID NO 406: SEQ ID NO 195 + A942P + A892P + D614N + T572I +
S884C + A893C
MFVFLVLLPLVSSQCVNLTTRTQLPPAYTNSFTRGVYYPDKVFRSSVLHSTQDLFLPFFSNVTWF
HAIHVSGTNGTKRFDNPVLPFNDGVYFASTEKSNIIRGWIFGTTLDSKTQSLLIVNNATNVVIKV
CEFQFCNDPFLGVYYHKNNKSWMESEFRVYSSANNCTFEYVSQPFLMDLEGKQGNFKNLREFVFK
NIDGYFKIYSKHTPINLVRDLPQGFSALEPLVDLPIGINITRFQTLLALHRSYLTPGDSSSGWTA
GAAAYYVGYLQPRTFLLKYNENGTITDAVDCALDPLSETKCTLKSFTVEKGIYQTSNFRVQPTES
IVRFPNITNLCPFGEVFNATRFASVYAWNRKRISNCVADYSVLYNSASFSTFKCYGVSPTKLNDL
CFTNVYADSFVIRGDEVRQIAPGQTGKIADYNYKLPDDFTGCVIAWNSNNLDSKVGGNYNYLYRL
FRKSNLKPFERDISTEIYQAGSTPCNGVEGFNCYFPLQSYGFQPTNGVGYQPYRVVVLSFELLHA
PATVCGPKKSTNLVKNKCVNFNFNGLTGTGVLTESNKKFLPFQQFGRDIADITDAVRDPQTLEIL
DITPCSFGGVSVITPGTNTSNQVAVLYQNVNCTEVPVAIHADQLTPTWRVYSTGSNVFQTRAGCL
IGAEHVNNSYECDIPIGAGICASYQTQTNSPRRARSVASQSIIAYTMSLGAENSVAYSNNSIAIP
TNFTISVTTEILPVSMTKTSVDCTMYICGDSTECSNLLLQYGSFCTQLNRALTGIAVEQDKNTQE
VFAQVKQIYKTPPIKDFGGFNFSQILPDPSKPSKRSFIEDLLFNKVTLADAGFIKQYGDCLGDIA
ARDLICAQKFNGLTVLPPLLTDEMIAQYTSALLAGTITCGWTFGAGPCLQIPFAMQMAYRFNGIG
VTQNVLYENQKLIANQFNSAIGKIQDSLSSTPSALGKLQDVVNQNAQALNTLVKQLSSNFGAISS
VLNDILSRLDPPEAEVQIDRLITGRLQSLQTYVTQQLIRAAEIRASANLAATKMSECVLGQSKRV
DFCGKGYHLMSFPQSAPHGVVFLHVTYVPAQEKNFTTAPAICHDGKAHFPREGVFVSNGTHWFVT
QRNFYEPQIITTDNTFVSGNCDVVIGIVNNTVYDPLQPELDSFKEELDKYFKNHTSPDVDLGDIS
GINASVVNIQKEIDRLNEVAKNLNESLIDLQELGKYEQYIKWPWYIWLGFIAGLIAIVMVTIMLC
CMTSCCSCLKGCCSCGSCCKFDEDDSEPVLKGVKLHYT
SEQ ID NO 407: SEQ ID NO 195 + A942P + A892P + D614N +
N532P + G880C + F888C
MFVFLVLLPLVSSQCVNLTTRTQLPPAYTNSFTRGVYYPDKVFRSSVLHSTQDLFLPFFSNVTWF
HAIHVSGTNGTKRFDNPVLPFNDGVYFASTEKSNIIRGWIFGTTLDSKTQSLLIVNNATNVVIKV
CEFQFCNDPFLGVYYHKNNKSWMESEFRVYSSANNCTFEYVSQPFLMDLEGKQGNFKNLREFVFK
NIDGYFKIYSKHTPINLVRDLPQGFSALEPLVDLPIGINITRFQTLLALHRSYLTPGDSSSGWTA
GAAAYYVGYLQPRTFLLKYNENGTITDAVDCALDPLSETKCTLKSFTVEKGIYQTSNFRVQPTES
IVRFPNITNLCPFGEVFNATRFASVYAWNRKRISNCVADYSVLYNSASFSTFKCYGVSPTKLNDL
CFTNVYADSFVIRGDEVRQIAPGQTGKIADYNYKLPDDFTGCVIAWNSNNLDSKVGGNYNYLYRL
FRKSNLKPFERDISTEIYQAGSTPCNGVEGFNCYFPLQSYGFQPTNGVGYQPYRVVVLSFELLHA
PATVCGPKKSTPLVKNKCVNFNFNGLTGTGVLTESNKKFLPFQQFGRDIADTTDAVRDPQTLEIL
DITPCSFGGVSVITPGTNTSNQVAVLYQNVNCTEVPVAIHADQLTPTWRVYSTGSNVFQTRAGCL
IGAEHVNNSYECDIPIGAGICASYQTQTNSPRRARSVASQSIIAYTMSLGAENSVAYSNNSIAIP
TNFTISVTTEILPVSMTKTSVDCTMYICGDSTECSNLLLQYGSFCTQLNRALTGIAVEQDKNTQE
VFAQVKQIYKTPPIKDFGGFNFSQILPDPSKPSKRSFIEDLLFNKVTLADAGFIKQYGDCLGDIA
ARDLICAQKFNGLTVLPPLLTDEMIAQYTSALLACTITSGWTCGAGPALQIPFAMQMAYRFNGIG
VTQNVLYENQKLIANQFNSAIGKIQDSLSSTPSALGKLQDVVNQNAQALNTLVKQLSSNFGAISS
VLNDILSRLDPPEAEVQIDRLITGRLQSLQTYVTQQLIRAAEIRASANLAATKMSECVLGQSKRV
DFCGKGYHLMSFPQSAPHGVVFLHVTYVPAQEKNFTTAPAICHDGKAHFPREGVFVSNGTHWFVT
QRNFYEPQIITTDNTFVSGNCDVVIGIVNNTVYDPLQPELDSFKEELDKYFKNHTSPDVDLGDIS
GINASVVNIQKEIDRLNEVAKNLNESLIDLQELGKYEQYIKWPWYIWLGFIAGLIAIVMVTIMLC
CMTSCCSCLKGCCSCGSCCKFDEDDSEPVLKGVKLHYT
SEQ ID NO 408: SEQ ID NO 195 + A942P + A892P + D614N +
N532P + S884C + A893C
MFVFLVLLPLVSSQCVNLTTRTQLPPAYTNSFTRGVYYPDKVFRSSVLHSTQDLFLPFFSNVTWF
HAIHVSGTNGTKRFDNPVLPFNDGVYFASTEKSNIIRGWIFGTTLDSKTQSLLIVNNATNVVIKV
CEFQFCNDPFLGVYYHKNNKSWMESEFRVYSSANNCTFEYVSQPFLMDLEGKQGNFKNLREFVFK
NIDGYFKIYSKHTPINLVRDLPQGFSALEPLVDLPIGINITRFQTLLALHRSYLTPGDSSSGWTA
GAAAYYVGYLQPRTFLLKYNENGTITDAVDCALDPLSETKCTLKSFTVEKGIYQTSNFRVQPTES
IVRFPNITNLCPFGEVFNATRFASVYAWNRKRISNCVADYSVLYNSASFSTFKCYGVSPTKLNDL
CFTNVYADSFVIRGDEVRQIAPGQTGKIADYNYKLPDDFTGCVIAWNSNNLDSKVGGNYNYLYRL
FRKSNLKPFERDISTEIYQAGSTPCNGVEGFNCYFPLQSYGFQPTNGVGYQPYRVVVLSFELLHA
PATVCGPKKSTPLVKNKCVNFNFNGLTGTGVLTESNKKFLPFQQFGRDIADTTDAVRDPQTLEIL
DITPCSFGGVSVITPGTNTSNQVAVLYQNVNCTEVPVAIHADQLTPTWRVYSTGSNVFQTRAGCL
IGAEHVNNSYECDIPIGAGICASYQTQTNSPRRARSVASQSIIAYTMSLGAENSVAYSNNSIAIP
TNFTISVTTEILPVSMTKTSVDCTMYICGDSTECSNLLLQYGSFCTQLNRALTGIAVEQDKNTQE
VFAQVKQIYKTPPIKDFGGFNFSQILPDPSKPSKRSFIEDLLFNKVTLADAGFIKQYGDCLGDIA
ARDLICAQKFNGLTVLPPLLTDEMIAQYTSALLAGTITCGWTFGAGPCLQIPFAMQMAYRFNGIG
VTQNVLYENQKLIANQFNSAIGKIQDSLSSTPSALGKLQDVVNQNAQALNTLVKQLSSNFGAISS
VLNDILSRLDPPEAEVQIDRLITGRLQSLQTYVTQQLIRAAEIRASANLAATKMSECVLGQSKRV
DFCGKGYHLMSFPQSAPHGVVFLHVTYVPAQEKNFTTAPAICHDGKAHFPREGVFVSNGTHWFVT
QRNFYEPQIITTDNTFVSGNCDVVIGIVNNTVYDPLQPELDSFKEELDKYFKNHTSPDVDLGDIS
GINASVVNIQKEIDRLNEVAKNLNESLIDLQELGKYEQYIKWPWYIWLGFIAGLIAIVMVTIMLC
CMTSCCSCLKGCCSCGSCCKFDEDDSEPVLKGVKLHYT
SEQ ID NO 409: SEQ ID NO 195 + A942P + A892P + T572I +
N532P + G880C + F888C
MFVFLVLLPLVSSQCVNLTTRTQLPPAYTNSFTRGVYYPDKVFRSSVLHSTQDLFLPFFSNVTWF
HAIHVSGTNGTKRFDNPVLPFNDGVYFASTEKSNIIRGWIFGTTLDSKTQSLLIVNNATNVVIKV
CEFQFCNDPFLGVYYHKNNKSWMESEFRVYSSANNCTFEYVSQPFLMDLEGKQGNFKNLREFVFK
NIDGYFKIYSKHTPINLVRDLPQGFSALEPLVDLPIGINITRFQTLLALHRSYLTPGDSSSGWTA
GAAAYYVGYLQPRTFLLKYNENGTITDAVDCALDPLSETKCTLKSFTVEKGIYQTSNFRVQPTES
IVRFPNITNLCPFGEVFNATRFASVYAWNRKRISNCVADYSVLYNSASFSTFKCYGVSPTKLNDL
CFTNVYADSFVIRGDEVRQIAPGQTGKIADYNYKLPDDFTGCVIAWNSNNLDSKVGGNYNYLYRL
FRKSNLKPFERDISTEIYQAGSTPCNGVEGFNCYFPLQSYGFQPTNGVGYQPYRVVVLSFELLHA
PATVCGPKKSTPLVKNKCVNFNFNGLTGTGVLTESNKKFLPFQQFGRDIADITDAVRDPQTLEIL
DITPCSFGGVSVITPGTNTSNQVAVLYQDVNCTEVPVAIHADQLTPTWRVYSTGSNVFQTRAGCL
IGAEHVNNSYECDIPIGAGICASYQTQTNSPRRARSVASQSIIAYTMSLGAENSVAYSNNSIAIP
TNFTISVTTEILPVSMTKTSVDCTMYICGDSTECSNLLLQYGSFCTQLNRALTGIAVEQDKNTQE
VFAQVKQIYKTPPIKDFGGFNFSQILPDPSKPSKRSFIEDLLFNKVTLADAGFIKQYGDCLGDIA
ARDLICAQKFNGLTVLPPLLTDEMIAQYTSALLACTITSGWTCGAGPALQIPFAMQMAYRFNGIG
VTQNVLYENQKLIANQFNSAIGKIQDSLSSTPSALGKLQDVVNQNAQALNTLVKQLSSNFGAISS
VLNDILSRLDPPEAEVQIDRLITGRLQSLQTYVTQQLIRAAEIRASANLAATKMSECVLGQSKRV
DFCGKGYHLMSFPQSAPHGVVFLHVTYVPAQEKNFTTAPAICHDGKAHFPREGVFVSNGTHWFVT
QRNFYEPQIITTDNTFVSGNCDVVIGIVNNTVYDPLQPELDSFKEELDKYFKNHTSPDVDLGDIS
GINASVVNIQKEIDRLNEVAKNLNESLIDLQELGKYEQYIKWPWYIWLGFIAGLIAIVMVTIMLC
CMTSCCSCLKGCCSCGSCCKFDEDDSEPVLKGVKLHYT
SEQ ID NO 410: SEQ ID NO 195 + A942P + A892P + T572I +
N532P + S884C + A893C
MFVFLVLLPLVSSQCVNLTTRTQLPPAYTNSFTRGVYYPDKVFRSSVLHSTQDLFLPFFSNVTWF
HAIHVSGTNGTKRFDNPVLPFNDGVYFASTEKSNIIRGWIFGTTLDSKTQSLLIVNNATNVVIKV
CEFQFCNDPFLGVYYHKNNKSWMESEFRVYSSANNCTFEYVSQPFLMDLEGKQGNFKNLREFVFK
NIDGYFKIYSKHTPINLVRDLPQGFSALEPLVDLPIGINITRFQTLLALHRSYLTPGDSSSGWTA
GAAAYYVGYLQPRTFLLKYNENGTITDAVDCALDPLSETKCTLKSFTVEKGIYQTSNFRVQPTES
IVRFPNITNLCPFGEVFNATRFASVYAWNRKRISNCVADYSVLYNSASFSTFKCYGVSPTKLNDL
CFTNVYADSFVIRGDEVRQIAPGQTGKIADYNYKLPDDFTGCVIAWNSNNLDSKVGGNYNYLYRL
FRKSNLKPFERDISTEIYQAGSTPCNGVEGFNCYFPLQSYGFQPTNGVGYQPYRVVVLSFELLHA
PATVCGPKKSTPLVKNKCVNFNFNGLTGTGVLTESNKKFLPFQQFGRDIADITDAVRDPQTLEIL
DITPCSFGGVSVITPGTNTSNQVAVLYQDVNCTEVPVAIHADQLTPTWRVYSTGSNVFQTRAGCL
IGAEHVNNSYECDIPIGAGICASYQTQTNSPRRARSVASQSIIAYTMSLGAENSVAYSNNSIAIP
TNFTISVTTEILPVSMTKTSVDCTMYICGDSTECSNLLLQYGSFCTQLNRALTGIAVEQDKNTQE
VFAQVKQIYKTPPIKDFGGFNFSQILPDPSKPSKRSFIEDLLFNKVTLADAGFIKQYGDCLGDIA
ARDLICAQKFNGLTVLPPLLTDEMIAQYTSALLAGTITCGWTFGAGPCLQIPFAMQMAYRFNGIG
VTQNVLYENQKLIANQFNSAIGKIQDSLSSTPSALGKLQDVVNQNAQALNTLVKQLSSNFGAISS
VLNDILSRLDPPEAEVQIDRLITGRLQSLQTYVTQQLIRAAEIRASANLAATKMSECVLGQSKRV
DFCGKGYHLMSFPQSAPHGVVFLHVTYVPAQEKNFTTAPAICHDGKAHFPREGVFVSNGTHWFVT
QRNFYEPQIITTDNTFVSGNCDVVIGIVNNTVYDPLQPELDSFKEELDKYFKNHTSPDVDLGDIS
GINASVVNIQKEIDRLNEVAKNLNESLIDLQELGKYEQYIKWPWYIWLGFIAGLIAIVMVTIMLC
CMTSCCSCLKGCCSCGSCCKFDEDDSEPVLKGVKLHYT
SEQ ID NO 411: SEQ ID NO 195 + A942P + D614N + T572I +
N532P + G880C + F888C
MFVFLVLLPLVSSQCVNLTTRTQLPPAYTNSFTRGVYYPDKVFRSSVLHSTQDLFLPFFSNVTWF
HAIHVSGTNGTKRFDNPVLPFNDGVYFASTEKSNIIRGWIFGTTLDSKTQSLLIVNNATNVVIKV
CEFQFCNDPFLGVYYHKNNKSWMESEFRVYSSANNCTFEYVSQPFLMDLEGKQGNFKNLREFVFK
NIDGYFKIYSKHTPINLVRDLPQGFSALEPLVDLPIGINITRFQTLLALHRSYLTPGDSSSGWTA
GAAAYYVGYLQPRTFLLKYNENGTITDAVDCALDPLSETKCTLKSFTVEKGIYQTSNFRVQPTES
IVRFPNITNLCPFGEVFNATRFASVYAWNRKRISNCVADYSVLYNSASFSTFKCYGVSPTKLNDL
CFTNVYADSFVIRGDEVRQIAPGQTGKIADYNYKLPDDFTGCVIAWNSNNLDSKVGGNYNYLYRL
FRKSNLKPFERDISTEIYQAGSTPCNGVEGFNCYFPLQSYGFQPTNGVGYQPYRVVVLSFELLHA
PATVCGPKKSTPLVKNKCVNFNFNGLTGTGVLTESNKKFLPFQQFGRDIADITDAVRDPQTLEIL
DITPCSFGGVSVITPGTNTSNQVAVLYQNVNCTEVPVAIHADQLTPTWRVYSTGSNVFQTRAGCL
IGAEHVNNSYECDIPIGAGICASYQTQTNSPRRARSVASQSIIAYTMSLGAENSVAYSNNSIAIP
TNFTISVTTEILPVSMTKTSVDCTMYICGDSTECSNLLLQYGSFCTQLNRALTGIAVEQDKNTQE
VFAQVKQIYKTPPIKDFGGFNFSQILPDPSKPSKRSFIEDLLFNKVTLADAGFIKQYGDCLGDIA
ARDLICAQKFNGLTVLPPLLTDEMIAQYTSALLACTITSGWTCGAGAALQIPFAMQMAYRFNGIG
VTQNVLYENQKLIANQFNSAIGKIQDSLSSTPSALGKLQDVVNQNAQALNTLVKQLSSNFGAISS
VLNDILSRLDPPEAEVQIDRLITGRLQSLQTYVTQQLIRAAEIRASANLAATKMSECVLGQSKRV
DFCGKGYHLMSFPQSAPHGVVFLHVTYVPAQEKNFTTAPAICHDGKAHFPREGVFVSNGTHWFVT
QRNFYEPQIITTDNTFVSGNCDVVIGIVNNTVYDPLQPELDSFKEELDKYFKNHTSPDVDLGDIS
GINASVVNIQKEIDRLNEVAKNLNESLIDLQELGKYEQYIKWPWYIWLGFIAGLIAIVMVTIMLC
CMTSCCSCLKGCCSCGSCCKFDEDDSEPVLKGVKLHYT
SEQ ID NO 412: SEQ ID NO 195 + A942P + D614N + T572I +
N532P + S884C + A893C
MFVFLVLLPLVSSQCVNLTTRTQLPPAYTNSFTRGVYYPDKVFRSSVLHSTQDLFLPFFSNVTWF
HAIHVSGTNGTKRFDNPVLPFNDGVYFASTEKSNIIRGWIFGTTLDSKTQSLLIVNNATNVVIKV
CEFQFCNDPFLGVYYHKNNKSWMESEFRVYSSANNCTFEYVSQPFLMDLEGKQGNFKNLREFVFK
NIDGYFKIYSKHTPINLVRDLPQGFSALEPLVDLPIGINITRFQTLLALHRSYLTPGDSSSGWTA
GAAAYYVGYLQPRTFLLKYNENGTITDAVDCALDPLSETKCTLKSFTVEKGIYQTSNFRVQPTES
IVRFPNITNLCPFGEVFNATRFASVYAWNRKRISNCVADYSVLYNSASFSTFKCYGVSPTKLNDL
CFTNVYADSFVIRGDEVRQIAPGQTGKIADYNYKLPDDFTGCVIAWNSNNLDSKVGGNYNYLYRL
FRKSNLKPFERDISTEIYQAGSTPCNGVEGFNCYFPLQSYGFQPTNGVGYQPYRVVVLSFELLHA
PATVCGPKKSTPLVKNKCVNFNFNGLTGTGVLTESNKKFLPFQQFGRDIADITDAVRDPQTLEIL
DITPCSFGGVSVITPGTNTSNQVAVLYQNVNCTEVPVAIHADQLTPTWRVYSTGSNVFQTRAGCL
IGAEHVNNSYECDIPIGAGICASYQTQTNSPRRARSVASQSIIAYTMSLGAENSVAYSNNSIAIP
TNFTISVTTEILPVSMTKTSVDCTMYICGDSTECSNLLLQYGSFCTQLNRALTGIAVEQDKNTQE
VFAQVKQIYKTPPIKDFGGFNFSQILPDPSKPSKRSFIEDLLFNKVTLADAGFIKQYGDCLGDIA
ARDLICAQKFNGLTVLPPLLTDEMIAQYTSALLAGTITCGWTFGAGACLQIPFAMQMAYRFNGIG
VTQNVLYENQKLIANQFNSAIGKIQDSLSSTPSALGKLQDVVNQNAQALNTLVKQLSSNFGAISS
VLNDILSRLDPPEAEVQIDRLITGRLQSLQTYVTQQLIRAAEIRASANLAATKMSECVLGQSKRV
DFCGKGYHLMSFPQSAPHGVVFLHVTYVPAQEKNFTTAPAICHDGKAHFPREGVFVSNGTHWFVT
QRNFYEPQIITTDNTFVSGNCDVVIGIVNNTVYDPLQPELDSFKEELDKYFKNHTSPDVDLGDIS
GINASVVNIQKEIDRLNEVAKNLNESLIDLQELGKYEQYIKWPWYIWLGFIAGLIAIVMVTIMLC
CMTSCCSCLKGCCSCGSCCKFDEDDSEPVLKGVKLHYT
SEQ ID NO 413: SEQ ID NO 195 + A892P + D614N + T572I +
N532P + G880C + F888C
MFVFLVLLPLVSSQCVNLTTRTQLPPAYTNSFTRGVYYPDKVFRSSVLHSTQDLFLPFFSNVTWF
HAIHVSGTNGTKRFDNPVLPFNDGVYFASTEKSNIIRGWIFGTTLDSKTQSLLIVNNATNVVIKV
CEFQFCNDPFLGVYYHKNNKSWMESEFRVYSSANNCTFEYVSQPFLMDLEGKQGNFKNLREFVFK
NIDGYFKIYSKHTPINLVRDLPQGFSALEPLVDLPIGINITRFQTLLALHRSYLTPGDSSSGWTA
GAAAYYVGYLQPRTFLLKYNENGTITDAVDCALDPLSETKCTLKSFTVEKGIYQTSNFRVQPTES
IVRFPNITNLCPFGEVFNATRFASVYAWNRKRISNCVADYSVLYNSASFSTFKCYGVSPTKLNDL
CFTNVYADSFVIRGDEVRQIAPGQTGKIADYNYKLPDDFTGCVIAWNSNNLDSKVGGNYNYLYRL
FRKSNLKPFERDISTEIYQAGSTPCNGVEGFNCYFPLQSYGFQPTNGVGYQPYRVVVLSFELLHA
PATVCGPKKSTPLVKNKCVNFNFNGLTGTGVLTESNKKFLPFQQFGRDIADITDAVRDPQTLEIL
DITPCSFGGVSVITPGTNTSNQVAVLYQNVNCTEVPVAIHADQLTPTWRVYSTGSNVFQTRAGCL
IGAEHVNNSYECDIPIGAGICASYQTQTNSPRRARSVASQSIIAYTMSLGAENSVAYSNNSIAIP
TNFTISVTTEILPVSMTKTSVDCTMYICGDSTECSNLLLQYGSFCTQLNRALTGIAVEQDKNTQE
VFAQVKQIYKTPPIKDFGGFNFSQILPDPSKPSKRSFIEDLLFNKVTLADAGFIKQYGDCLGDIA
ARDLICAQKFNGLTVLPPLLTDEMIAQYTSALLACTITSGWTCGAGPALQIPFAMQMAYRFNGIG
VTQNVLYENQKLIANQFNSAIGKIQDSLSSTASALGKLQDVVNQNAQALNTLVKQLSSNFGAISS
VLNDILSRLDPPEAEVQIDRLITGRLQSLQTYVTQQLIRAAEIRASANLAATKMSECVLGQSKRV
DFCGKGYHLMSFPQSAPHGVVFLHVTYVPAQEKNFTTAPAICHDGKAHFPREGVFVSNGTHWFVT
QRNFYEPQIITTDNTFVSGNCDVVIGIVNNTVYDPLQPELDSFKEELDKYFKNHTSPDVDLGDIS
GINASVVNIQKEIDRLNEVAKNLNESLIDLQELGKYEQYIKWPWYIWLGFIAGLIAIVMVTIMLC
CMTSCCSCLKGCCSCGSCCKFDEDDSEPVLKGVKLHYT
SEQ ID NO 414: SEQ ID NO 195 + A892P + D614N + T572I +
N532P + S884C + A893C
MFVFLVLLPLVSSQCVNLTTRTQLPPAYTNSFTRGVYYPDKVFRSSVLHSTQDLFLPFFSNVTWF
HAIHVSGTNGTKRFDNPVLPFNDGVYFASTEKSNIIRGWIFGTTLDSKTQSLLIVNNATNVVIKV
CEFQFCNDPFLGVYYHKNNKSWMESEFRVYSSANNCTFEYVSQPFLMDLEGKQGNFKNLREFVFK
NIDGYFKIYSKHTPINLVRDLPQGFSALEPLVDLPIGINITRFQTLLALHRSYLTPGDSSSGWTA
GAAAYYVGYLQPRTFLLKYNENGTITDAVDCALDPLSETKCTLKSFTVEKGIYQTSNFRVQPTES
IVRFPNITNLCPFGEVFNATRFASVYAWNRKRISNCVADYSVLYNSASFSTFKCYGVSPTKLNDL
CFTNVYADSFVIRGDEVRQIAPGQTGKIADYNYKLPDDFTGCVIAWNSNNLDSKVGGNYNYLYRL
FRKSNLKPFERDISTEIYQAGSTPCNGVEGFNCYFPLQSYGFQPTNGVGYQPYRVVVLSFELLHA
PATVCGPKKSTPLVKNKCVNFNFNGLTGTGVLTESNKKFLPFQQFGRDIADITDAVRDPQTLEIL
DITPCSFGGVSVITPGTNTSNQVAVLYQNVNCTEVPVAIHADQLTPTWRVYSTGSNVFQTRAGCL
IGAEHVNNSYECDIPIGAGICASYQTQTNSPRRARSVASQSIIAYTMSLGAENSVAYSNNSIAIP
TNFTISVTTEILPVSMTKTSVDCTMYICGDSTECSNLLLQYGSFCTQLNRALTGIAVEQDKNTQE
VFAQVKQIYKTPPIKDFGGFNFSQILPDPSKPSKRSFIEDLLFNKVTLADAGFIKQYGDCLGDIA
ARDLICAQKFNGLTVLPPLLTDEMIAQYTSALLAGTITCGWTFGAGPCLQIPFAMQMAYRFNGIG
VTQNVLYENQKLIANQFNSAIGKIQDSLSSTASALGKLQDVVNQNAQALNTLVKQLSSNFGAISS
VLNDILSRLDPPEAEVQIDRLITGRLQSLQTYVTQQLIRAAEIRASANLAATKMSECVLGQSKRV
DFCGKGYHLMSFPQSAPHGVVFLHVTYVPAQEKNFTTAPAICHDGKAHFPREGVFVSNGTHWFVT
QRNFYEPQIITTDNTFVSGNCDVVIGIVNNTVYDPLQPELDSFKEELDKYFKNHTSPDVDLGDIS
GINASVVNIQKEIDRLNEVAKNLNESLIDLQELGKYEQYIKWPWYIWLGFIAGLIAIVMVTIMLC
CMTSCCSCLKGCCSCGSCCKFDEDDSEPVLKGVKLHYT
SEQ ID NO 415: SEQ ID NO 195 + A942P + A892P + D614N + T572I +
N532P + G880C + F888C
MFVFLVLLPLVSSQCVNLTTRTQLPPAYTNSFTRGVYYPDKVFRSSVLHSTQDLFLPFFSNVTWF
HAIHVSGTNGTKRFDNPVLPFNDGVYFASTEKSNIIRGWIFGTTLDSKTQSLLIVNNATNVVIKV
CEFQFCNDPFLGVYYHKNNKSWMESEFRVYSSANNCTFEYVSQPFLMDLEGKQGNFKNLREFVFK
NIDGYFKIYSKHTPINLVRDLPQGFSALEPLVDLPIGINITRFQTLLALHRSYLTPGDSSSGWTA
GAAAYYVGYLQPRTFLLKYNENGTITDAVDCALDPLSETKCTLKSFTVEKGIYQTSNFRVQPTES
IVRFPNITNLCPFGEVFNATRFASVYAWNRKRISNCVADYSVLYNSASFSTFKCYGVSPTKLNDL
CFTNVYADSFVIRGDEVRQIAPGQTGKIADYNYKLPDDFTGCVIAWNSNNLDSKVGGNYNYLYRL
FRKSNLKPFERDISTEIYQAGSTPCNGVEGFNCYFPLQSYGFQPTNGVGYQPYRVVVLSFELLHA
PATVCGPKKSTPLVKNKCVNFNFNGLTGTGVLTESNKKFLPFQQFGRDIADITDAVRDPQTLEIL
DITPCSFGGVSVITPGTNTSNQVAVLYQNVNCTEVPVAIHADQLTPTWRVYSTGSNVFQTRAGCL
IGAEHVNNSYECDIPIGAGICASYQTQTNSPRRARSVASQSIIAYTMSLGAENSVAYSNNSIAIP
TNFTISVTTEILPVSMTKTSVDCTMYICGDSTECSNLLLQYGSFCTQLNRALTGIAVEQDKNTQE
VFAQVKQIYKTPPIKDFGGFNFSQILPDPSKPSKRSFIEDLLFNKVTLADAGFIKQYGDCLGDIA
ARDLICAQKFNGLTVLPPLLTDEMIAQYTSALLACTITSGWTCGAGPALQIPFAMQMAYRFNGIG
VTQNVLYENQKLIANQFNSAIGKIQDSLSSTPSALGKLQDVVNQNAQALNTLVKQLSSNFGAISS
VLNDILSRLDPPEAEVQIDRLITGRLQSLQTYVTQQLIRAAEIRASANLAATKMSECVLGQSKRV
DFCGKGYHLMSFPQSAPHGVVFLHVTYVPAQEKNFTTAPAICHDGKAHFPREGVFVSNGTHWFVT
QRNFYEPQIITTDNTFVSGNCDVVIGIVNNTVYDPLQPELDSFKEELDKYFKNHTSPDVDLGDIS
GINASVVNIQKEIDRLNEVAKNLNESLIDLQELGKYEQYIKWPWYIWLGFIAGLIAIVMVTIMLC
CMTSCCSCLKGCCSCGSCCKFDEDDSEPVLKGVKLHYT
SEQ ID NO 416: SEQ ID NO 195 + A942P + A892P + D614N +
T572I + N532P + S884C + A893C
MFVFLVLLPLVSSQCVNLTTRTQLPPAYTNSFTRGVYYPDKVFRSSVLHSTQDLFLPFFSNVTWF
HAIHVSGTNGTKRFDNPVLPFNDGVYFASTEKSNIIRGWIFGTTLDSKTQSLLIVNNATNVVIKV
CEFQFCNDPFLGVYYHKNNKSWMESEFRVYSSANNCTFEYVSQPFLMDLEGKQGNFKNLREFVFK
NIDGYFKIYSKHTPINLVRDLPQGFSALEPLVDLPIGINITRFQTLLALHRSYLTPGDSSSGWTA
GAAAYYVGYLQPRTFLLKYNENGTITDAVDCALDPLSETKCTLKSFTVEKGIYQTSNFRVQPTES
IVRFPNITNLCPFGEVFNATRFASVYAWNRKRISNCVADYSVLYNSASFSTFKCYGVSPTKLNDL
CFTNVYADSFVIRGDEVRQIAPGQTGKIADYNYKLPDDFTGCVIAWNSNNLDSKVGGNYNYLYRL
FRKSNLKPFERDISTEIYQAGSTPCNGVEGFNCYFPLQSYGFQPTNGVGYQPYRVVVLSFELLHA
PATVCGPKKSTPLVKNKCVNFNFNGLTGTGVLTESNKKFLPFQQFGRDIADITDAVRDPQTLEIL
DITPCSFGGVSVITPGTNTSNQVAVLYQNVNCTEVPVAIHADQLTPTWRVYSTGSNVFQTRAGCL
IGAEHVNNSYECDIPIGAGICASYQTQTNSPRRARSVASQSIIAYTMSLGAENSVAYSNNSIAIP
TNFTISVTTEILPVSMTKTSVDCTMYICGDSTECSNLLLQYGSFCTQLNRALTGIAVEQDKNTQE
VFAQVKQIYKTPPIKDFGGFNFSQILPDPSKPSKRSFIEDLLFNKVTLADAGFIKQYGDCLGDIA
ARDLICAQKFNGLTVLPPLLTDEMIAQYTSALLAGTITCGWTFGAGPCLQIPFAMQMAYRFNGIG
VTQNVLYENQKLIANQFNSAIGKIQDSLSSTPSALGKLQDVVNQNAQALNTLVKQLSSNFGAISS
VLNDILSRLDPPEAEVQIDRLITGRLQSLQTYVTQQLIRAAEIRASANLAATKMSECVLGQSKRV
DFCGKGYHLMSFPQSAPHGVVFLHVTYVPAQEKNFTTAPAICHDGKAHFPREGVFVSNGTHWFVT
QRNFYEPQIITTDNTFVSGNCDVVIGIVNNTVYDPLQPELDSFKEELDKYFKNHTSPDVDLGDIS
GINASVVNIQKEIDRLNEVAKNLNESLIDLQELGKYEQYIKWPWYIWLGFIAGLIAIVMVTIMLC
CMTSCCSCLKGCCSCGSCCKFDEDDSEPVLKGVKLHYT
SEQ ID NO: 417 (COR201225)-S protein-R682S R685G N532P T572I D614G
G880C F888C A944P V987P no foldon
MFVFLVLLPLVSSQCVNLTTRTQLPPAYTNSFTRGVYYPDKVFRSSVLHSTQDLFLPFFSNVTWF
HAIHVSGTNGTKRFDNPVLPFNDGVYFASTEKSNIIRGWIFGTTLDSKTQSLLIVNNATNVVIKV
CEFQFCNDPFLGVYYHKNNKSWMESEFRVYSSANNCTFEYVSQPFLMDLEGKQGNFKNLREFVFK
NIDGYFKIYSKHTPINLVRDLPQGFSALEPLVDLPIGINITRFQTLLALHRSYLTPGDSSSGWTA
GAAAYYVGYLQPRTFLLKYNENGTITDAVDCALDPLSETKCTLKSFTVEKGIYQTSNFRVQPTES
IVRFPNITNLCPFGEVFNATRFASVYAWNRKRISNCVADYSVLYNSASFSTFKCYGVSPTKLNDL
CFTNVYADSFVIRGDEVRQIAPGQTGKIADYNYKLPDDFTGCVIAWNSNNLDSKVGGNYNYLYRL
FRKSNLKPFERDISTEIYQAGSTPCNGVEGFNCYFPLQSYGFQPTNGVGYQPYRVVVLSFELLHA
PATVCGPKKSTpLVKNKCVNFNFNGLTGTGVLTESNKKFLPFQQFGRDIADITDAVRDPQTLEIL
DITPCSFGGVSVITPGTNTSNQVAVLYQgVNCTEVPVAIHADQLTPTWRVYSTGSNVFQTRAGCL
IGAEHVNNSYECDIPIGAGICASYQTQTNSPsRAgSVASQSIIAYTMSLGAENSVAYSNNSIAIP
TNFTISVTTEILPVSMTKTSVDCTMYICGDSTECSNLLLQYGSFCTQLNRALTGIAVEQDKNTQE
VFAQVKQIYKTPPIKDFGGFNFSQILPDPSKPSKRSFIEDLLFNKVTLADAGFIKQYGDCLGDIA
ARDLICAQKENGLTVLPPLLTDEMIAQYTSALLACTITSGWTcGAGAALQIPFAMQMAYRFNGIG
VTQNVLYENQKLIANQFNSAIGKIQDSLSSTASpLGKLQDVVNQNAQALNTLVKQLSSNFGAISS
VLNDILSRLDKpEAEVQIDRLITGRLQSLQTYVTQQLIRAAEIRASANLAATKMSECVLGQSKRV
DFCGKGYHLMSFPQSAPHGVVFLHVTYVPAQEKNFTTAPAICHDGKAHFPREGVFVSNGTHWFVT
QRNFYEPQIITTDNTFVSGNCDVVIGIVNNTVYDPLQPELDSFKEELDKYFKNHTSPDVDLGDIS
GINASVVNIQKEIDRLNEVAKNLNESLIDLQELGKYEQ
Signal peptide
SEQ ID NO: 418 (COR200619)-S protein-R682S R685G A892P A942P
D614N V987P no foldon
MFVFLVLLPLVSSQCVNLTTRTQLPPAYTNSFTRGVYYPDKVFRSSVLHSTQDLFLPFFSNVTWF
HAIHVSGTNGTKRFDNPVLPFNDGVYFASTEKSNIIRGWIFGTTLDSKTQSLLIVNNATNVVIKV
CEFQFCNDPFLGVYYHKNNKSWMESEFRVYSSANNCTFEYVSQPFLMDLEGKQGNFKNLREFVFK
NIDGYFKIYSKHTPINLVRDLPQGFSALEPLVDLPIGINITRFQTLLALHRSYLTPGDSSSGWTA
GAAAYYVGYLQPRTFLLKYNENGTITDAVDCALDPLSETKCTLKSFTVEKGIYQTSNFRVQPTES
IVRFPNITNLCPFGEVFNATRFASVYAWNRKRISNCVADYSVLYNSASFSTFKCYGVSPTKLNDL
CFTNVYADSFVIRGDEVRQIAPGQTGKIADYNYKLPDDFTGCVIAWNSNNLDSKVGGNYNYLYRL
FRKSNLKPFERDISTEIYQAGSTPCNGVEGFNCYFPLQSYGFQPTNGVGYQPYRVVVLSFELLHA
PATVCGPKKSTNLVKNKCVNFNFNGLTGTGVLTESNKKFLPFQQFGRDIADTTDAVRDPQTLEIL
DITPCSFGGVSVITPGTNTSNQVAVLYQNVNCTEVPVAIHADQLTPTWRVYSTGSNVFQTRAGCL
IGAEHVNNSYECDIPIGAGICASYQTQTNSPSRAGSVASQSIIAYTMSLGAENSVAYSNNSIAIP
TNFTISVTTEILPVSMTKTSVDCTMYICGDSTECSNLLLQYGSFCTQLNRALTGIAVEQDKNTQE
VFAQVKQIYKTPPIKDFGGFNFSQILPDPSKPSKRSFIEDLLFNKVTLADAGFIKQYGDCLGDIA
ARDLICAQKFNGLTVLPPLLTDEMIAQYTSALLAGTITSGWTFGAGPALQIPFAMQMAYRFNGIG
VTQNVLYENQKLIANQFNSAIGKIQDSLSSTPSALGKLQDVVNQNAQALNTLVKQLSSNFGAISS
VLNDILSRLDKPEAEVQIDRLITGRLQSLQTYVTQQLIRAAEIRASANLAATKMSECVLGQSKRV
DFCGKGYHLMSFPQSAPHGVVFLHVTYVPAQEKNFTTAPAICHDGKAHFPREGVFVSNGTHWFVT
QRNFYEPQIITTDNTFVSGNCDVVIGIVNNTVYDPLQPELDSFKEELDKYFKNHTSPDVDLGDIS
GINASVVNIQKEIDRLNEVAKNLNESLIDLQELGKYEQ
Signal peptide
SEQ ID NO: 419 (COR200627)-Soluble stabilized SARS-CoV-S S protein
(furinKO + PP + Foldon) with sortaseA-Ctag and
A942P mutation
MFVFLVLLPLVSSQCVNLTTRTQLPPAYTNSFTRGVYYPDKVFRSSVLHSTQDLFLPFFSNVTWF
HAIHVSGTNGTKRFDNPVLPFNDGVYFASTEKSNIIRGWIFGTTLDSKTQSLLIVNNATNVVIKV
CEFQFCNDPFLGVYYHKNNKSWMESEFRVYSSANNCTFEYVSQPFLMDLEGKQGNFKNLREFVFK
NIDGYFKIYSKHTPINLVRDLPQGFSALEPLVDLPIGINITRFQTLLALHRSYLTPGDSSSGWTA
GAAAYYVGYLQPRTFLLKYNENGTITDAVDCALDPLSETKCTLKSFTVEKGIYQTSNFRVQPTES
IVRFPNITNLCPFGEVFNATRFASVYAWNRKRISNCVADYSVLYNSASFSTFKCYGVSPTKLNDL
CFTNVYADSFVIRGDEVRQIAPGQTGKIADYNYKLPDDFTGCVIAWNSNNLDSKVGGNYNYLYRL
FRKSNLKPFERDISTEIYQAGSTPCNGVEGFNCYFPLQSYGFQPTNGVGYQPYRVVVLSFELLHA
PATVCGPKKSTNLVKNKCVNFNFNGLTGTGVLTESNKKFLPFQQFGRDIADTTDAVRDPQTLEIL
DITPCSFGGVSVITPGTNTSNQVAVLYQDVNCTEVPVAIHADQLTPTWRVYSTGSNVFQTRAGCL
IGAEHVNNSYECDIPIGAGICASYQTQTNSPSRAGSVASQSIIAYTMSLGAENSVAYSNNSIAIP
TNFTISVTTEILPVSMTKTSVDCTMYICGDSTECSNLLLQYGSFCTQLNRALTGIAVEQDKNTQE
VFAQVKQIYKTPPIKDFGGFNFSQILPDPSKPSKRSFIEDLLFNKVTLADAGFIKQYGDCLGDIA
ARDLICAQKFNGLTVLPPLLTDEMIAQYTSALLAGTITSGWTFGAGAALQIPFAMQMAYRFNGIG
VTQNVLYENQKLIANQFNSAIGKIQDSLSSTPSALGKLQDVVNQNAQALNTLVKQLSSNFGAISS
VLNDILSRLDPPEAEVQIDRLITGRLQSLQTYVTQQLIRAAEIRASANLAATKMSECVLGQSKRV
DFCGKGYHLMSFPQSAPHGVVFLHVTYVPAQEKNFTTAPAICHDGKAHFPREGVFVSNGTHWFVT
QRNFYEPQIITTDNTFVSGNCDVVIGIVNNTVYDPLQPELDSFKEELDKYFKNHTSPDVDLGDIS
GINASVVNIQKEIDRLNEVAKNLNESLIDLQELGKYEQGSGYIPEAPRDGQAYVRKDGEWVLLST
FLLPATGGSEPEA
Signal peptide
SEQ ID NO: 420 (COR201291)
MFVFLVLLPLVSSQCVNLTTRTQLPPAYTNSFTRGVYYPDKVFRSSVLHSTQDLFLPFFSNVTWF
HAIHVSGTNGTKRFDNPVLPFNDGVYFASTEKSNIIRGWIFGTTLDSKTQSLLIVNNATNVVIKV
CEFQFCNDPFLGVYYHKNNKSWMESEFRVYSSANNCTFEYVSQPFLMDLEGKQGNFKNLREFVFK
NIDGYFKIYSKHTPINLVRDLPQGFSALEPLVDLPIGINITRFQTLLALHRSYLTPGDSSSGWTA
GAAAYYVGYLQPRTFLLKYNENGTITDAVDCALDPLSETKCTLKSFTVEKGIYQTSNFRVQPTES
IVRFPNITNLCPFGEVFNATRFASVYAWNRKRISNCVADYSVLYNSASFSTFKCYGVSPTKLNDL
CFTNVYADSFVIRGDEVRQIAPGQTGKIADYNYKLPDDFTGCVIAWNSNNLDSKVGGNYNYLYRL
FRKSNLKPFERDISTEIYQAGSTPCNGVEGFNCYFPLQSYGFQPTNGVGYQPYRVVVLSFELLHA
PATVCGPKKSTpLVKNKCVNFNFNGLTGTGVLTESNKKFLPFQQFGRDIADITDAVRDPQTLEIL
DITPCSFGGVSVITPGTNTSNQVAVLYQgVNCTEVPVAIHADQLTPTWRVYSTGSNVFQTRAGCL
IGAEHVNNSYECDIPIGAGICASYQTQTNSPsRAgSVASQSIIAYTMSLGAENSVAYSNNSIAIP
TNFTISVTTEILPVSMTKTSVDCTMYICGDSTECSNLLLQYGSFCTQLNRALTGIAVEQDKNTQE
VFAQVKQIYKTPPIKDFGGFNFSQILPDPSKPSKRSFIEDLLFNKVTLADAGFIKQYGDCLGDIA
ARDLICAQKENGLTVLPPLLTDEMIAQYTSALLACTITSGWTcGAGAALQIPFAMQMAYRFNGIG
VTQNVLYENQKLIANQFNSAIGKIQDSLSSTASpLGKLQDVVNQNAQALNTLVKQLSSNFGAISS
VLNDILSRLDKVEAEVQIDRLITGRLQSLQTYVTQQLIRAAEIRASANLAATKMSECVLGQSKRV
DFCGKGYHLMSFPQSAPHGVVFLHVTYVPAQEKNFTTAPAICHDGKAHFPREGVFVSNGTHWFVT
QRNFYEPQIITTDNTFVSGNCDVVIGIVNNTVYDPLQPELDSFKEELDKYFKNHTSPDVDLGDIS
GINASVVNIQKEIDRLNEVAKNLNESLIDLQELGKYEQ
SEQ ID NO: 421 (COR200017)
MFVFLVLLPLVSSQCVNLTTRTQLPPAYTNSFTRGVYYPDKVFRSSVLHSTQDLFLPFFSNVTWF
HAIHVSGTNGTKRFDNPVLPFNDGVYFASTEKSNIIRGWIFGTTLDSKTQSLLIVNNATNVVIKV
CEFQFCNDPFLGVYYHKNNKSWMESEFRVYSSANNCTFEYVSQPFLMDLEGKQGNFKNLREFVFK
NIDGYFKIYSKHTPINLVRDLPQGFSALEPLVDLPIGINITRFQTLLALHRSYLTPGDSSSGWTA
GAAAYYVGYLQPRTFLLKYNENGTITDAVDCALDPLSETKCTLKSFTVEKGIYQTSNFRVQPTES
IVRFPNITNLCPFGEVFNATRFASVYAWNRKRISNCVADYSVLYNSASFSTFKCYGVSPTKLNDL
CFTNVYADSFVIRGDEVRQIAPGQTGKIADYNYKLPDDFTGCVIAWNSNNLDSKVGGNYNYLYRL
FRKSNLKPFERDISTEIYQAGSTPCNGVEGFNCYFPLQSYGFQPTNGVGYQPYRVVVLSFELLHA
PATVCGPKKSTNLVKNKCVNFNFNGLTGTGVLTESNKKFLPFQQFGRDIADTTDAVRDPQTLEIL
DITPCSFGGVSVITPGTNTSNQVAVLYQDVNCTEVPVAIHADQLTPTWRVYSTGSNVFQTRAGCL
IGAEHVNNSYECDIPIGAGICASYQTQTNSPsRAgSVASQSIIAYTMSLGAENSVAYSNNSIAIP
TNFTISVTTEILPVSMTKTSVDCTMYICGDSTECSNLLLQYGSFCTQLNRALTGIAVEQDKNTQE
VFAQVKQIYKTPPIKDFGGFNFSQILPDPSKPSKRSFIEDLLFNKVTLADAGFIKQYGDCLGDIA
ARDLICAQKFNGLTVLPPLLTDEMIAQYTSALLAGTITSGWTFGAGAALQIPFAMQMAYRFNGIG
VTQNVLYENQKLIANQFNSAIGKIQDSLSSTASALGKLQDVVNQNAQALNTLVKQLSSNFGAISS
VLNDILSRLDppEAEVQIDRLITGRLQSLQTYVTQQLIRAAEIRASANLAATKMSECVLGQSKRV
DFCGKGYHLMSFPQSAPHGVVFLHVTYVPAQEKNFTTAPAICHDGKAHFPREGVFVSNGTHWFVT
QRNFYEPQIITTDNTFVSGNCDVVIGIVNNTVYDPLQPELDSFKEELDKYFKNHTSPDVDLGDIS
GINASVVNIQKEIDRLNEVAKNLNESLIDLQELGKYEQGSGYIPEAPRDGQAYVRKDGEWVLLST
FLGRSLEVLFQGPGSLPETGGGSDYKDDDDKGGGGSGGGGSGGGGSGGGGSGGGGSHHHHHH

The application's sequence listing, which the Patent Office published only in electronic form, follows.

SEQUENCE LISTING (422 sequences)

SEQ ID NO: 1 - protein, 1273 aa, Severe acute respiratory syndrome coronavirus 2
MFVFLVLLPLVSSQCVNLTTRTQLPPAYTNSFTRGVYYPDKVFRSSVLHSTQDLFLPFFSNVTWFHAIHVSGTNGTKRFDNPVLPFNDGVYFASTEKSNIIRGWIFGTTLDSKTQSLLIVNNATNVVIKVCEFQFCNDPFLGVYYHKNNKSWMESEFRVYSSANNCTFEYVSQPFLMDLEGKQGNFKNLREFVFKNIDGYFKIYSKHTPINLVRDLPQGFSALEPLVDLPIGINITRFQTLLALHRSYLTPGDSSSGWTAGAAAYYVGYLQPRTFLLKYNENGTITDAVDCALDPLSETKCTLKSFTVEKGIYQTSNFRVQPTESIVRFPNITNLCPFGEVFNATRFASVYAWNRKRISNCVADYSVLYNSASFSTFKCYGVSPTKLNDLCFTNVYADSFVIRGDEVRQIAPGQTGKIADYNYKLPDDFTGCVIAWNSNNLDSKVGGNYNYLYRLFRKSNLKPFERDISTEIYQAGSTPCNGVEGFNCYFPLQSYGFQPTNGVGYQPYRVVVLSFELLHAPATVCGPKKSTNLVKNKCVNFNFNGLTGTGVLTESNKKFLPFQQFGRDIADTTDAVRDPQTLEILDITPCSFGGVSVITPGTNTSNQVAVLYQDVNCTEVPVAIHADQLTPTWRVYSTGSNVFQTRAGCLIGAEHVNNSYECDIPIGAGICASYQTQTNSPRRARSVASQSIIAYTMSLGAENSVAYSNNSIAIPTNFTISVTTEILPVSMTKTSVDCTMYICGDSTECSNLLLQYGSFCTQLNRALTGIAVEQDKNTQEVFAQVKQIYKTPPIKDFGGFNFSQILPDPSKPSKRSFIEDLLFNKVTLADAGFIKQYGDCLGDIAARDLICAQKFNGLTVLPPLLTDEMIAQYTSALLAGTITSGWTFGAGAALQIPFAMQMAYRFNGIGVTQNVLYENQKLIANQFNSAIGKIQDSLSSTASALGKLQDVVNQNAQALNTLVKQLSSNFGAISSVLNDILSRLDKVEAEVQIDRLITGRLQSLQTYVTQQLIRAAEIRASANLAATKMSECVLGQSKRVDFCGKGYHLMSFPQSAPHGVVFLHVTYVPAQEKNFTTAPAICHDGKAHFPREGVFVSNGTHWFVTQRNFYEPQIITTDNTFVSGNCDVVIGIVNNTVYDPLQPELDSFKEELDKYFKNHTSPDVDLGDISGINASVVNIQKEIDRLNEVAKNLNESLIDLQELGKYEQYIKWPWYIWLGFIAGLIAIVMVTIMLCCMTSCCSCLKGCCSCGSCCKFDEDDSEPVLKGVKLHYT

SEQ ID NO: 2 - protein, 1297 aa, Artificial Sequence
  source: /note="Description of Artificial Sequence: Synthetic polypeptide"
MFVFLVLLPLVSSQCVNLTTRTQLPPAYTNSFTRGVYYPDKVFRSSVLHSTQDLFLPFFSNVTWFHAIHVSGTNGTKRFDNPVLPFNDGVYFASTEKSNIIRGWIFGTTLDSKTQSLLIVNNATNVVIKVCEFQFCNDPFLGVYYHKNNKSWMESEFRVYSSANNCTFEYVSQPFLMDLEGKQGNFKNLREFVFKNIDGYFKIYSKHTPINLVRDLPQGFSALEPLVDLPIGINITRFQTLLALHRSYLTPGDSSSGWTAGAAAYYVGYLQPRTFLLKYNENGTITDAVDCALDPLSETKCTLKSFTVEKGIYQTSNFRVQPTESIVRFPNITNLCPFGEVFNATRFASVYAWNRKRISNCVADYSVLYNSASFSTFKCYGVSPTKLNDLCFTNVYADSFVIRGDEVRQIAPGQTGKIADYNYKLPDDFTGCVIAWNSNNLDSKVGGNYNYLYRLFRKSNLKPFERDISTEIYQAGSTPCNGVEGFNCYFPLQSYGFQPTNGVGYQPYRVVVLSFELLHAPATVCGPKKSTNLVKNKCVNFNFNGLTGTGVLTESNKKFLPFQQFGRDIADTTDAVRDPQTLEILDITPCSFGGVSVITPGTNTSNQVAVLYQDVNCTEVPVAIHADQLTPTWRVYSTGSNVFQTRAGCLIGAEHVNNSYECDIPIGAGICASYQTQTNSPSRAGSVASQSIIAYTMSLGAENSVAYSNNSIAIPTNFTISVTTEILPVSMTKTSVDCTMYICGDSTECSNLLLQYGSFCTQLNRALTGIAVEQDKNTQEVFAQVKQIYKTPPIKDFGGFNFSQILPDPSKPSKRSFIEDLLFNKVTLADAGFIKQYGDCLGDIAARDLICAQKFNGLTVLPPLLTDEMIAQYTSALLAGTITSGWTFGAGAALQIPFAMQMAYRFNGIGVTQNVLYENQKLIANQFNSAIGKIQDSLSSTASALGKLQDVVNQNAQALNTLVKQLSSNFGAISSVLNDILSRLDKVEAEVQIDRLITGRLQSLQTYVTQQLIRAAEIRASANLAATKMSECVLGQSKRVDFCGKGYHLMSFPQSAPHGVVFLHVTYVPAQEKNFTTAPAICHDGKAHFPREGVFVSNGTHWFVTQRNFYEPQIITTDNTFVSGNCDVVIGIVNNTVYDPLQPELDSFKEELDKYFKNHTSPDVDLGDISGINASVVNIQKEIDRLNEVAKNLNESLIDLQELGKYEQGSGYIPEAPRDGQAYVRKDGEWVLLSTFLGRSLEVLFQGPGSLPETGGGSDYKDDDDKGGGGSGGGGSGGGGSGGGGSGGGGSHHHHHH

SEQ ID NO: 3 - protein, 1297 aa, Artificial Sequence
  source: /note="Description of Artificial Sequence: Synthetic polypeptide"
MFVFLVLLPLVSSQCVNLTTRTQLPPAYTNSFTRGVYYPDKVFRSSVLHSTQDLFLPFFSNVTWFHAIHVSGTNGTKRFDNPVLPFNDGVYFASTEKSNIIRGWIFGTTLDSKTQSLLIVNNATNVVIKVCEFQFCNDPFLGVYYHKNNKSWMESEFRVYSSANNCTFEYVSQPFLMDLEGKQGNFKNLREFVFKNIDGYFKIYSKHTPINLVRDLPQGFSALEPLVDLPIGINITRFQTLLALHRSYLTPGDSSSGWTAGAAAYYVGYLQPRTFLLKYNENGTITDAVDCALDPLSETKCTLKSFTVEKGIYQTSNFRVQPTESIVRFPNITNLCPFGEVFNATRFASVYAWNRKRISNCVADYSVLYNSASFSTFKCYGVSPTKLNDLCFTNVYADSFVIRGDEVRQIAPGQTGKIADYNYKLPDDFTGCVIAWNSNNLDSKVGGNYNYLYRLFRKSNLKPFERDISTEIYQAGSTPCNGVEGFNCYFPLQSYGFQPTNGVGYQPYRVVVLSFELLHAPATVCGPKKSTNLVKNKCVNFNFNGLTGTGVLTESNKKFLPFQQFGRDIADTTDAVRDPQTLEILDITPCSFGGVSVITPGTNTSNQVAVLYQDVNCTEVPVAIHADQLTPTWRVYSTGSNVFQTRAGCLIGAEHVNNSYECDIPIGAGICASYQTQTNSPSRAGSVASQSIIAYTMSLGAENSVAYSNNSIAIPTNFTISVTTEILPVSMTKTSVDCTMYICGDSTECSNLLLQYGSFCTQLNRALTGIAVEQDKNTQEVFAQVKQIYKTPPIKDFGGFNFSQILPDPSKPSKRSFIEDLLFNKVTLADAGFIKQYGDCLGDIAARDLICAQKFNGLTVLPPLLTDEMIAQYTSALLAGTITSGWTFGAGAALQIPFAMQMAYRFNGIGVTQNVLYENQKLIANQFNSAIGKIQDSLSSTASALGKLQDVVNQNAQALNTLVKQLSSNFGAISSVLNDILSRLDPPEAEVQIDRLITGRLQSLQTYVTQQLIRAAEIRASANLAATKMSECVLGQSKRVDFCGKGYHLMSFPQSAPHGVVFLHVTYVPAQEKNFTTAPAICHDGKAHFPREGVFVSNGTHWFVTQRNFYEPQIITTDNTFVSGNCDVVIGIVNNTVYDPLQPELDSFKEELDKYFKNHTSPDVDLGDISGINASVVNIQKEIDRLNEVAKNLNESLIDLQELGKYEQGSGYIPEAPRDGQAYVRKDGEWVLLSTFLGRSLEVLFQGPGSLPETGGGSDYKDDDDKGGGGSGGGGSGGGGSGGGGSGGGGSHHHHHH

SEQ ID NO: 4 - protein, 27 aa, Escherichia virus T4
GYIPEAPRDGQAYVRKDGEWVLLSTFL

SEQ ID NO: 5 - protein, 1297 aa, Artificial Sequence
  source: /note="Description of Artificial Sequence: Synthetic polypeptide"
MFVFLVLLPLVSSQCVNLTTRTQLPPAYTNSFTRGVYYPDKVFRSSVLHSTQDLFLPFFSNVTWFHAIHVSGTNGTKRFDNPVLPFNDGVYFASTEKSNIIRGWIFGTTLDSKTQSLLIVNNATNVVIKVCEFQFCNDPFLGVYYHKNNKSWMESEFRVYSSANNCTFEYVSQPFLMDLEGKQGNFKNLREFVFKNIDGYFKIYSKHTPINLVRDLPQGFSALEPLVDLPIGINITRFQTLLALHRSYLTPGDSSSGWTAGAAAYYVGYLQPRTFLLKYNENGTITDAVDCALDPLSETKCTLKSFTVEKGIYQTSNFRVQPTESIVRFPNITNLCPFGEVFNATRFASVYAWNRKRISNCVADYSVLYNSASFSTFKCYGVSPTKLNDLCFTNVYADSFVIRGDEVRQIAPGQTGKIADYNYKLPDDFTGCVIAWNSNNLDSKVGGNYNYLYRLFRKSNLKPFERDISTEIYQAGSTPCNGVEGFNCYFPLQSYGFQPTNGVGYQPYRVVVLSFELLHAPATVCGPKKSTNLVKNKCVNFNFNGLTGTGVLTESNKKFLPFQQFGRDIADTTDAVRDPQTLEILDITPCSFGGVSVITPGTNTSNQVAVLYQDVNCTEVPVAIHADQLTPTWRVYSTGSNVFQTRAGCLIGAEHVNNSYECDIPIGAGICASYQTQTNSPSRAGSVASQSIIAYTMSLGAENSVAYSNNSIAIPTNFTISVTTEILPVSMTKTSVDCTMYICGDSTECSNLLLQYGSFCTQLNRALTGIAVEQDKNTQEVFAQVKQIYKTPPIKDFGGFNFSQILPDPSKPSKRSFIEDLLFNKVTLADAGFIKQYGDCLGDIAARDLICAQKFNGLTVLPPLLTDEMIAQYTSALLAGTITSGWTFGAGAALQIPFAMQMAYRFNGIGVTQNVLYENQKLIANQFNSAIGKIQDSLSSTPSALGKLQDVVNQNAQALNTLVKQLSSNFGAISSVLNDILSRLDKVEAEVQIDRLITGRLQSLQTYVTQQLIRAAEIRASANLAATKMSECVLGQSKRVDFCGKGYHLMSFPQSAPHGVVFLHVTYVPAQEKNFTTAPAICHDGKAHFPREGVFVSNGTHWFVTQRNFYEPQIITTDNTFVSGNCDVVIGIVNNTVYDPLQPELDSFKEELDKYFKNHTSPDVDLGDISGINASVVNIQKEIDRLNEVAKNLNESLIDLQELGKYEQGSGYIPEAPRDGQAYVRKDGEWVLLSTFLGRSLEVLFQGPGSLPETGGGSDYKDDDDKGGGGSGGGGSGGGGSGGGGSGGGGSHHHHHH

SEQ ID NO: 6 - protein, 1297 aa, Artificial Sequence
  source: /note="Description of Artificial Sequence: Synthetic polypeptide"
MFVFLVLLPLVSSQCVNLTTRTQLPPAYTNSFTRGVYYPDKVFRSSVLHSTQDLFLPFFSNVTWFHAIHVSGTNGTKRFDNPVLPFNDGVYFASTEKSNIIRGWIFGTTLDSKTQSLLIVNNATNVVIKVCEFQFCNDPFLGVYYHKNNKSWMESEFRVYSSANNCTFEYVSQPFLMDLEGKQGNFKNLREFVFKNIDGYFKIYSKHTPINLVRDLPQGFSALEPLVDLPIGINITRFQTLLALHRSYLTPGDSSSGWTAGAAAYYVGYLQPRTFLLKYNENGTITDAVDCALDPLSETKCTLKSFTVEKGIYQTSNFRVQPTESIVRFPNITNLCPFGEVFNATRFASVYAWNRKRISNCVADYSVLYNSASFSTFKCYGVSPTKLNDLCFTNVYADSFVIRGDEVRQIAPGQTGKIADYNYKLPDDFTGCVIAWNSNNLDSKVGGNYNYLYRLFRKSNLKPFERDISTEIYQAGSTPCNGVEGFNCYFPLQSYGFQPTNGVGYQPYRVVVLSFELLHAPATVCGPKKSTNLVKNKCVNFNFNGLTGTGVLTESNKKFLPFQQFGRDIADTTDAVRDPQTLEILDITPCSFGGVSVITPGTNTSNQVAVLYQDVNCTEVPVAIHADQLTPTWRVYSTGSNVFQTRAGCLIGAEHVNNSYECDIPIGAGICASYQTQTNSPSRAGSVASQSIIAYTMSLGAENSVAYSNNSIAIPTNFTISVTTEILPVSMTKTSVDCTMYICGDSTECSNLLLQYGSFCTQLNRALTGIAVEQDKNTQEVFAQVKQIYKTPPIKDFGGFNFSQILPDPSKPSKRSFIEDLLFNKVTLADAGFIKQYGDCLGDIAARDLICAQKFNGLTVLPPLLTDEMIAQYTSALLAGTITSGWTFGAGPALQIPFAMQMAYRFNGIGVTQNVLYENQKLIANQFNSAIGKIQDSLSSTASALGKLQDVVNQNAQALNTLVKQLSSNFGAISSVLNDILSRLDKVEAEVQIDRLITGRLQSLQTYVTQQLIRAAEIRASANLAATKMSECVLGQSKRVDFCGKGYHLMSFPQSAPHGVVFLHVTYVPAQEKNFTTAPAICHDGKAHFPREGVFVSNGTHWFVTQRNFYEPQIITTDNTFVSGNCDVVIGIVNNTVYDPLQPELDSFKEELDKYFKNHTSPDVDLGDISGINASVVNIQKEIDRLNEVAKNLNESLIDLQELGKYEQGSGYIPEAPRDGQAYVRKDGEWVLLSTFLGRSLEVLFQGPGSLPETGGGSDYKDDDDKGGGGSGGGGSGGGGSGGGGSGGGGSHHHHHH

SEQ ID NO: 7 - protein, 1297 aa, Artificial Sequence
  source: /note="Description of Artificial Sequence: Synthetic polypeptide"
MFVFLVLLPLVSSQCVNLTTRTQLPPAYTNSFTRGVYYPDKVFRSSVLHSTQDLFLPFFSNVTWFHAIHVSGTNGTKRFDNPVLPFNDGVYFASTEKSNIIRGWIFGTTLDSKTQSLLIVNNATNVVIKVCEFQFCNDPFLGVYYHKNNKSWMESEFRVYSSANNCTFEYVSQPFLMDLEGKQGNFKNLREFVFKNIDGYFKIYSKHTPINLVRDLPQGFSALEPLVDLPIGINITRFQTLLALHRSYLTPGDSSSGWTAGAAAYYVGYLQPRTFLLKYNENGTITDAVDCALDPLSETKCTLKSFTVEKGIYQTSNFRVQPTESIVRFPNITNLCPFGEVFNATRFASVYAWNRKRISNCVADYSVLYNSASFSTFKCYGVSPTKLNDLCFTNVYADSFVIRGDEVRQIAPGQTGKIADYNYKLPDDFTGCVIAWNSNNLDSKVGGNYNYLYRLFRKSNLKPFERDISTEIYQAGSTPCNGVEGFNCYFPLQSYGFQPTNGVGYQPYRVVVLSFELLHAPATVCGPKKSTNLVKNKCVNFNFNGLTGTGVLTESNKKFLPFQQFGRDIADTTDAVRDPQTLEILDITPCSFGGVSVITPGTNTSNQVAVLYQNVNCTEVPVAIHADQLTPTWRVYSTGSNVFQTRAGCLIGAEHVNNSYECDIPIGAGICASYQTQTNSPSRAGSVASQSIIAYTMSLGAENSVAYSNNSIAIPTNFTISVTTEILPVSMTKTSVDCTMYICGDSTECSNLLLQYGSFCTQLNRALTGIAVEQDKNTQEVFAQVKQIYKTPPIKDFGGFNFSQILPDPSKPSKRSFIEDLLFNKVTLADAGFIKQYGDCLGDIAARDLICAQKFNGLTVLPPLLTDEMIAQYTSALLAGTITSGWTFGAGAALQIPFAMQMAYRFNGIGVTQNVLYENQKLIANQFNSAIGKIQDSLSSTASALGKLQDVVNQNAQALNTLVKQLSSNFGAISSVLNDILSRLDKVEAEVQIDRLITGRLQSLQTYVTQQLIRAAEIRASANLAATKMSECVLGQSKRVDFCGKGYHLMSFPQSAPHGVVFLHVTYVPAQEKNFTTAPAICHDGKAHFPREGVFVSNGTHWFVTQRNFYEPQIITTDNTFVSGNCDVVIGIVNNTVYDPLQPELDSFKEELDKYFKNHTSPDVDLGDISGINASVVNIQKEIDRLNEVAKNLNESLIDLQELGKYEQGSGYIPEAPRDGQAYVRKDGEWVLLSTFLGRSLEVLFQGPGSLPETGGGSDYKDDDDKGGGGSGGGGSGGGGSGGGGSGGGGSHHHHHH

SEQ ID NO: 8 - protein, 1297 aa, Artificial Sequence
  source: /note="Description of Artificial Sequence: Synthetic polypeptide"
MFVFLVLLPLVSSQCVNLTTRTQLPPAYTNSFTRGVYYPDKVFRSSVLHSTQDLFLPFFSNVTWFHAIHVSGTNGTKRFDNPVLPFNDGVYFASTEKSNIIRGWIFGTTLDSKTQSLLIVNNATNVVIKVCEFQFCNDPFLGVYYHKNNKSWMESEFRVYSSANNCTFEYVSQPFLMDLEGKQGNFKNLREFVFKNIDGYFKIYSKHTPINLVRDLPQGFSALEPLVDLPIGINITRFQTLLALHRSYLTPGDSSSGWTAGAAAYYVGYLQPRTFLLKYNENGTITDAVDCALDPLSETKCTLKSFTVEKGIYQTSNFRVQPTESIVRFPNITNLCPFGEVFNATRFASVYAWNRKRISNCVADYSVLYNSASFSTFKCYGVSPTKLNDLCFTNVYADSFVIRGDEVRQIAPGQTGKIADYNYKLPDDFTGCVIAWNSNNLDSKVGGNYNYLYRLFRKSNLKPFERDISTEIYQAGSTPCNGVEGFNCYFPLQSYGFQPTNGVGYQPYRVVVLSFELLHAPATVCGPKKSTNLVKNKCVNFNFNGLTGTGVLTESNKKFLPFQQFGRDIADITDAVRDPQTLEILDITPCSFGGVSVITPGTNTSNQVAVLYQDVNCTEVPVAIHADQLTPTWRVYSTGSNVFQTRAGCLIGAEHVNNSYECDIPIGAGICASYQTQTNSPSRAGSVASQSIIAYTMSLGAENSVAYSNNSIAIPTNFTISVTTEILPVSMTKTSVDCTMYICGDSTECSNLLLQYGSFCTQLNRALTGIAVEQDKNTQEVFAQVKQIYKTPPIKDFGGFNFSQILPDPSKPSKRSFIEDLLFNKVTLADAGFIKQYGDCLGDIAARDLICAQKFNGLTVLPPLLTDEMIAQYTSALLAGTITSGWTFGAGAALQIPFAMQMAYRFNGIGVTQNVLYENQKLIANQFNSAIGKIQDSLSSTASALGKLQDVVNQNAQALNTLVKQLSSNFGAISSVLNDILSRLDKVEAEVQIDRLITGRLQSLQTYVTQQLIRAAEIRASANLAATKMSECVLGQSKRVDFCGKGYHLMSFPQSAPHGVVFLHVTYVPAQEKNFTTAPAICHDGKAHFPREGVFVSNGTHWFVTQRNFYEPQIITTDNTFVSGNCDVVIGIVNNTVYDPLQPELDSFKEELDKYFKNHTSPDVDLGDISGINASVVNIQKEIDRLNEVAKNLNESLIDLQELGKYEQGSGYIPEAPRDGQAYVRKDGEWVLLSTFLGRSLEVLFQGPGSLPETGGGSDYKDDDDKGGGGSGGGGSGGGGSGGGGSGGGGSHHHHHH

SEQ ID NO: 9 - protein, 1297 aa, Artificial Sequence
  source: /note="Description of Artificial Sequence: Synthetic polypeptide"
MFVFLVLLPLVSSQCVNLTTRTQLPPAYTNSFTRGVYYPDKVFRSSVLHSTQDLFLPFFSNVTWFHAIHVSGTNGTKRFDNPVLPFNDGVYFASTEKSNIIRGWIFGTTLDSKTQSLLIVNNATNVVIKVCEFQFCNDPFLGVYYHKNNKSWMESEFRVYSSANNCTFEYVSQPFLMDLEGKQGNFKNLREFVFKNIDGYFKIYSKHTPINLVRDLPQGFSALEPLVDLPIGINITRFQTLLALHRSYLTPGDSSSGWTAGAAAYYVGYLQPRTFLLKYNENGTITDAVDCALDPLSETKCTLKSFTVEKGIYQTSNFRVQPTESIVRFPNITNLCPFGEVFNATRFASVYAWNRKRISNCVADYSVLYNSASFSTFKCYGVSPTKLNDLCFTNVYADSFVIRGDEVRQIAPGQTGKIADYNYKLPDDFTGCVIAWNSNNLDSKVGGNYNYLYRLFRKSNLKPFERDISTEIYQAGSTPCNGVEGFNCYFPLQSYGFQPTNGVGYQPYRVVVLSFELLHAPATVCGPKKSTPLVKNKCVNFNFNGLTGTGVLTESNKKFLPFQQFGRDIADTTDAVRDPQTLEILDITPCSFGGVSVITPGTNTSNQVAVLYQDVNCTEVPVAIHADQLTPTWRVYSTGSNVFQTRAGCLIGAEHVNNSYECDIPIGAGICASYQTQTNSPSRAGSVASQSIIAYTMSLGAENSVAYSNNSIAIPTNFTISVTTEILPVSMTKTSVDCTMYICGDSTECSNLLLQYGSFCTQLNRALTGIAVEQDKNTQEVFAQVKQIYKTPPIKDFGGFNFSQILPDPSKPSKRSFIEDLLFNKVTLADAGFIKQYGDCLGDIAARDLICAQKFNGLTVLPPLLTDEMIAQYTSALLAGTITSGWTFGAGAALQIPFAMQMAYRFNGIGVTQNVLYENQKLIANQFNSAIGKIQDSLSSTASALGKLQDVVNQNAQALNTLVKQLSSNFGAISSVLNDILSRLDKVEAEVQIDRLITGRLQSLQTYVTQQLIRAAEIRASANLAATKMSECVLGQSKRVDFCGKGYHLMSFPQSAPHGVVFLHVTYVPAQEKNFTTAPAICHDGKAHFPREGVFVSNGTHWFVTQRNFYEPQIITTDNTFVSGNCDVVIGIVNNTVYDPLQPELDSFKEELDKYFKNHTSPDVDLGDISGINASVVNIQKEIDRLNEVAKNLNESLIDLQELGKYEQGSGYIPEAPRDGQAYVRKDGEWVLLSTFLGRSLEVLFQGPGSLPETGGGSDYKDDDDKGGGGSGGGGSGGGGSGGGGSGGGGSHHHHHH

SEQ ID NO: 10 - protein, 1297 aa, Artificial Sequence
  source: /note="Description of Artificial Sequence: Synthetic polypeptide"
MFVFLVLLPLVSSQCVNLTTRTQLPPAYTNSFTRGVYYPDKVFRSSVLHSTQDLFLPFFSNVTWFHAIHVSGTNGTKRFDNPVLPFNDGVYFASTEKSNIIRGWIFGTTLDSKTQSLLIVNNATNVVIKVCEFQFCNDPFLGVYYHKNNKSWMESEFRVYSSANNCTFEYVSQPFLMDLEGKQGNFKNLREFVFKNIDGYFKIYSKHTPINLVRDLPQGFSALEPLVDLPIGINITRFQTLLALHRSYLTPGDSSSGWTAGAAAYYVGYLQPRTFLLKYNENGTITDAVDCALDPLSETKCTLKSFTVEKGIYQTSNFRVQPTESIVRFPNITNLCPFGEVFNATRFASVYAWNRKRISNCVADYSVLYNSASFSTFKCYGVSPTKLNDLCFTNVYADSFVIRGDEVRQIAPGQTGKIADYNYKLPDDFTGCVIAWNSNNLDSKVGGNYNYLYRLFRKSNLKPFERDISTEIYQAGSTPCNGVEGFNCYFPLQSYGFQPTNGVGYQPYRVVVLSFELLHAPATVCGPKKSTNLVKNKCVNFNFNGLTGTGVLTESNKKFLPFQQFGRDIADTTDAVRDPQTLEILDITPCSFGGVSVITPGTNTSNQVAVLYQDVNCTEVPVAIHADQLTPTWRVYSTGSNVFQTRAGCLIGAEHVNNSYECDIPIGAGICASYQTQTNSPSRAGSVASQSIIAYTMSLGAENSVAYSNNSIAIPTNFTISVTTEILPVSMTKTSVDCTMYICGDSTECSNLLLQYGSFCTQLNRALTGIAVEQDKNTQEVFAQVKQIYKTPPIKDFGGFNFSQILPDPSKPSKRSFIEDLLFNKVTLADAGFIKQYGDCLGDIAARDLICAQKFNGLTVLPPLLTDEMIAQYTSALLACTITSGWTCGAGAALQIPFAMQMAYRFNGIGVTQNVLYENQKLIANQFNSAIGKIQDSLSSTASALGKLQDVVNQNAQALNTLVKQLSSNFGAISSVLNDILSRLDKVEAEVQIDRLITGRLQSLQTYVTQQLIRAAEIRASANLAATKMSECVLGQSKRVDFCGKGYHLMSFPQSAPHGVVFLHVTYVPAQEKNFTTAPAICHDGKAHFPREGVFVSNGTHWFVTQRNFYEPQIITTDNTFVSGNCDVVIGIVNNTVYDPLQPELDSFKEELDKYFKNHTSPDVDLGDISGINASVVNIQKEIDRLNEVAKNLNESLIDLQELGKYEQGSGYIPEAPRDGQAYVRKDGEWVLLSTFLGRSLEVLFQGPGSLPETGGGSDYKDDDDKGGGGSGGGGSGGGGSGGGGSGGGGSHHHHHH

SEQ ID NO: 11 - protein, 1297 aa, Artificial Sequence
  source: /note="Description of Artificial Sequence: Synthetic polypeptide"
MFVFLVLLPLVSSQCVNLTTRTQLPPAYTNSFTRGVYYPDKVFRSSVLHSTQDLFLPFFSNVTWFHAIHVSGTNGTKRFDNPVLPFNDGVYFASTEKSNIIRGWIFGTTLDSKTQSLLIVNNATNVVIKVCEFQFCNDPFLGVYYHKNNKSWMESEFRVYSSANNCTFEYVSQPFLMDLEGKQGNFKNLREFVFKNIDGYFKIYSKHTPINLVRDLPQGFSALEPLVDLPIGINITRFQTLLALHRSYLTPGDSSSGWTAGAAAYYVGYLQPRTFLLKYNENGTITDAVDCALDPLSETKCTLKSFTVEKGIYQTSNFRVQPTESIVRFPNITNLCPFGEVFNATRFASVYAWNRKRISNCVADYSVLYNSASFSTFKCYGVSPTKLNDLCFTNVYADSFVIRGDEVRQIAPGQTGKIADYNYKLPDDFTGCVIAWNSNNLDSKVGGNYNYLYRLFRKSNLKPFERDISTEIYQAGSTPCNGVEGFNCYFPLQSYGFQPTNGVGYQPYRVVVLSFELLHAPATVCGPKKSTNLVKNKCVNFNFNGLTGTGVLTESNKKFLPFQQFGRDIADTTDAVRDPQTLEILDITPCSFGGVSVITPGTNTSNQVAVLYQDVNCTEVPVAIHADQLTPTWRVYSTGSNVFQTRAGCLIGAEHVNNSYECDIPIGAGICASYQTQTNSPSRAGSVASQSIIAYTMSLGAENSVAYSNNSIAIPTNFTISVTTEILPVSMTKTSVDCTMYICGDSTECSNLLLQYGSFCTQLNRALTGIAVEQDKNTQEVFAQVKQIYKTPPIKDFGGFNFSQILPDPSKPSKRSFIEDLLFNKVTLADAGFIKQYGDCLGDIAARDLICAQKFNGLTVLPPLLTDEMIAQYTSALLAGTITCGWTFGAGACLQIPFAMQMAYRFNGIGVTQNVLYENQKLIANQFNSAIGKIQDSLSSTASALGKLQDVVNQNAQALNTLVKQLSSNFGAISSVLNDILSRLDKVEAEVQIDRLITGRLQSLQTYVTQQLIRAAEIRASANLAATKMSECVLGQSKRVDFCGKGYHLMSFPQSAPHGVVFLHVTYVPAQEKNFTTAPAICHDGKAHFPREGVFVSNGTHWFVTQRNFYEPQIITTDNTFVSGNCDVVIGIVNNTVYDPLQPELDSFKEELDKYFKNHTSPDVDLGDISGINASVVNIQKEIDRLNEVAKNLNESLIDLQELGKYEQGSGYIPEAPRDGQAYVRKDGEWVLLSTFLGRSLEVLFQGPGSLPETGGGSDYKDDDDKGGGGSGGGGSGGGGSGGGGSGGGGSHHHHHH

SEQ ID NO: 12 - protein, 1297 aa, Artificial Sequence
  source: /note="Description of Artificial Sequence: Synthetic polypeptide"
MFVFLVLLPLVSSQCVNLTTRTQLPPAYTNSFTRGVYYPDKVFRSSVLHSTQDLFLPFFSNVTWFHAIHVSGTNGTKRFDNPVLPFNDGVYFASTEKSNIIRGWIFGTTLDSKTQSLLIVNNATNVVIKVCEFQFCNDPFLGVYYHKNNKSWMESEFRVYSSANNCTFEYVSQPFLMDLEGKQGNFKNLREFVFKNIDGYFKIYSKHTPINLVRDLPQGFSALEPLVDLPIGINITRFQTLLALHRSYLTPGDSSSGWTAGAAAYYVGYLQPRTFLLKYNENGTITDAVDCALDPLSETKCTLKSFTVEKGIYQTSNFRVQPTESIVRFPNITNLCPFGEVFNATRFASVYAWNRKRISNCVADYSVLYNSASFSTFKCYGVSPTKLNDLCFTNVYADSFVIRGDEVRQIAPGQTGKIADYNYKLPDDFTGCVIAWNSNNLDSKVGGNYNYLYRLFRKSNLKPFERDISTEIYQAGSTPCNGVEGFNCYFPLQSYGFQPTNGVGYQPYRVVVLSFELLHAPATVCGPKKSTNLVKNKCVNFNFNGLTGTGVLTESNKKFLPFQQFGRDIADTTDAVRDPQTLEILDITPCSFGGVSVITPGTNTSNQVAVLYQDVNCTEVPVAIHADQLTPTWRVYSTGSNVFQTRAGCLIGAEHVNNSYECDIPIGAGICASYQTQTNSPSRAGSVASQSIIAYTMSLGAENSVAYSNNSIAIPTNFTISVTTEILPVSMTKTSVDCTMYICGDSTECSNLLLQYGSFCTQLNRALTGIAVEQDKNTQEVFAQVKQIYKTPPIKDFGGFNFSQILPDPSKPSKRSFIEDLLFNKVTLADAGFIKQYGDCLGDIAARDLICAQKFNGLTVLPPLLTDEMIAQYTSALLAGTITSGWTFGAGAALQIPFAMQMAYRFNGIGVTQNVLYENQKLIANQFNSAIGKIQDSLSSTPSALGKLQDVVNQNAQALNTLVKQLSSNFGAISSVLNDILSRLDPPEAEVQIDRLITGRLQSLQTYVTQQLIRAAEIRASANLAATKMSECVLGQSKRVDFCGKGYHLMSFPQSAPHGVVFLHVTYVPAQEKNFTTAPAICHDGKAHFPREGVFVSNGTHWFVTQRNFYEPQIITTDNTFVSGNCDVVIGIVNNTVYDPLQPELDSFKEELDKYFKNHTSPDVDLGDISGINASVVNIQKEIDRLNEVAKNLNESLIDLQELGKYEQGSGYIPEAPRDGQAYVRKDGEWVLLSTFLGRSLEVLFQGPGSLPETGGGSDYKDDDDKGGGGSGGGGSGGGGSGGGGSGGGGSHHHHHH

SEQ ID NO: 13 - protein, 1297 aa, Artificial Sequence
  source: /note="Description of Artificial Sequence: Synthetic polypeptide"
MFVFLVLLPLVSSQCVNLTTRTQLPPAYTNSFTRGVYYPDKVFRSSVLHSTQDLFLPFFSNVTWFHAIHVSGTNGTKRFDNPVLPFNDGVYFASTEKSNIIRGWIFGTTLDSKTQSLLIVNNATNVVIKVCEFQFCNDPFLGVYYHKNNKSWMESEFRVYSSANNCTFEYVSQPFLMDLEGKQGNFKNLREFVFKNIDGYFKIYSKHTPINLVRDLPQGFSALEPLVDLPIGINITRFQTLLALHRSYLTPGDSSSGWTAGAAAYYVGYLQPRTFLLKYNENGTITDAVDCALDPLSETKCTLKSFTVEKGIYQTSNFRVQPTESIVRFPNITNLCPFGEVFNATRFASVYAWNRKRISNCVADYSVLYNSASFSTFKCYGVSPTKLNDLCFTNVYADSFVIRGDEVRQIAPGQTGKIADYNYKLPDDFTGCVIAWNSNNLDSKVGGNYNYLYRLFRKSNLKPFERDISTEIYQAGSTPCNGVEGFNCYFPLQSYGFQPTNGVGYQPYRVVVLSFELLHAPATVCGPKKSTNLVKNKCVNFNFNGLTGTGVLTESNKKFLPFQQFGRDIADTTDAVRDPQTLEILDITPCSFGGVSVITPGTNTSNQVAVLYQDVNCTEVPVAIHADQLTPTWRVYSTGSNVFQTRAGCLIGAEHVNNSYECDIPIGAGICASYQTQTNSPSRAGSVASQSIIAYTMSLGAENSVAYSNNSIAIPTNFTISVTTEILPVSMTKTSVDCTMYICGDSTECSNLLLQYGSFCTQLNRALTGIAVEQDKNTQEVFAQVKQIYKTPPIKDFGGFNFSQILPDPSKPSKRSFIEDLLFNKVTLADAGFIKQYGDCLGDIAARDLICAQKFNGLTVLPPLLTDEMIAQYTSALLAGTITSGWTFGAGPALQIPFAMQMAYRFNGIGVTQNVLYENQKLIANQFNSAIGKIQDSLSSTASALGKLQDVVNQNAQALNTLVKQLSSNFGAISSVLNDILSRLDPPEAEVQIDRLITGRLQSLQTYVTQQLIRAAEIRASANLAATKMSECVLGQSKRVDFCGKGYHLMSFPQSAPHGVVFLHVTYVPAQEKNFTTAPAICHDGKAHFPREGVFVSNGTHWFVTQRNFYEPQIITTDNTFVSGNCDVVIGIVNNTVYDPLQPELDSFKEELDKYFKNHTSPDVDLGDISGINASVVNIQKEIDRLNEVAKNLNESLIDLQELGKYEQGSGYIPEAPRDGQAYVRKDGEWVLLSTFLGRSLEVLFQGPGSLPETGGGSDYKDDDDKGGGGSGGGGSGGGGSGGGGSGGGGSHHHHHH

SEQ ID NO: 14 - protein, 1297 aa, Artificial Sequence
  source: /note="Description of Artificial Sequence: Synthetic polypeptide"
MFVFLVLLPLVSSQCVNLTTRTQLPPAYTNSFTRGVYYPDKVFRSSVLHSTQDLFLPFFSNVTWFHAIHVSGTNGTKRFDNPVLPFNDGVYFASTEKSNIIRGWIFGTTLDSKTQSLLIVNNATNVVIKVCEFQFCNDPFLGVYYHKNNKSWMESEFRVYSSANNCTFEYVSQPFLMDLEGKQGNFKNLREFVFKNIDGYFKIYSKHTPINLVRDLPQGFSALEPLVDLPIGINITRFQTLLALHRSYLTPGDSSSGWTAGAAAYYVGYLQPRTFLLKYNENGTITDAVDCALDPLSETKCTLKSFTVEKGIYQTSNFRVQPTESIVRFPNITNLCPFGEVFNATRFASVYAWNRKRISNCVADYSVLYNSASFSTFKCYGVSPTKLNDLCFTNVYADSFVIRGDEVRQIAPGQTGKIADYNYKLPDDFTGCVIAWNSNNLDSKVGGNYNYLYRLFRKSNLKPFERDISTEIYQAGSTPCNGVEGFNCYFPLQSYGFQPTNGVGYQPYRVVVLSFELLHAPATVCGPKKSTNLVKNKCVNFNFNGLTGTGVLTESNKKFLPFQQFGRDIADTTDAVRDPQTLEILDITPCSFGGVSVITPGTNTSNQVAVLYQNVNCTEVPVAIHADQLTPTWRVYSTGSNVFQTRAGCLIGAEHVNNSYECDIPIGAGICASYQTQTNSPSRAGSVASQSIIAYTMSLGAENSVAYSNNSIAIPTNFTISVTTEILPVSMTKTSVDCTMYICGDSTECSNLLLQYGSFCTQLNRALTGIAVEQDKNTQEVFAQVKQIYKTPPIKDFGGFNFSQILPDPSKPSKRSFIEDLLFNKVTLADAGFIKQYGDCLGDIAARDLICAQKFNGLTVLPPLLTDEMIAQYTSALLAGTITSGWTFGAGAALQIPFAMQMAYRFNGIGVTQNVLYENQKLIANQFNSAIGKIQDSLSSTASALGKLQDVVNQNAQALNTLVKQLSSNFGAISSVLNDILSRLDPPEAEVQIDRLITGRLQSLQTYVTQQLIRAAEIRASANLAATKMSECVLGQSKRVDFCGKGYHLMSFPQSAPHGVVFLHVTYVPAQEKNFTTAPAICHDGKAHFPREGVFVSNGTHWFVTQRNFYEPQIITTDNTFVSGNCDVVIGIVNNTVYDPLQPELDSFKEELDKYFKNHTSPDVDLGDISGINASVVNIQKEIDRLNEVAKNLNESLIDLQELGKYEQGSGYIPEAPRDGQAYVRKDGEWVLLSTFLGRSLEVLFQGPGSLPETGGGSDYKDDDDKGGGGSGGGGSGGGGSGGGGSGGGGSHHHHHH

SEQ ID NO: 15 - protein, 1297 aa, Artificial Sequence
  source: /note="Description of Artificial Sequence: Synthetic polypeptide"
MFVFLVLLPLVSSQCVNLTTRTQLPPAYTNSFTRGVYYPDKVFRSSVLHSTQDLFLPFFSNVTWFHAIHVSGTNGTKRFDNPVLPFNDGVYFASTEKSNIIRGWIFGTTLDSKTQSLLIVNNATNVVIKVCEFQFCNDPFLGVYYHKNNKSWMESEFRVYSSANNCTFEYVSQPFLMDLEGKQGNFKNLREFVFKNIDGYFKIYSKHTPINLVRDLPQGFSALEPLVDLPIGINITRFQTLLALHRSYLTPGDSSSGWTAGAAAYYVGYLQPRTFLLKYNENGTITDAVDCALDPLSETKCTLKSFTVEKGIYQTSNFRVQPTESIVRFPNITNLCPFGEVFNATRFASVYAWNRKRISNCVADYSVLYNSASFSTFKCYGVSPTKLNDLCFTNVYADSFVIRGDEVRQIAPGQTGKIADYNYKLPDDFTGCVIAWNSNNLDSKVGGNYNYLYRLFRKSNLKPFERDISTEIYQAGSTPCNGVEGFNCYFPLQSYGFQPTNGVGYQPYRVVVLSFELLHAPATVCGPKKSTNLVKNKCVNFNFNGLTGTGVLTESNKKFLPFQQFGRDIADITDAVRDPQTLEILDITPCSFGGVSVITPGTNTSNQVAVLYQDVNCTEVPVAIHADQLTPTWRVYSTGSNVFQTRAGCLIGAEHVNNSYECDIPIGAGICASYQTQTNSPSRAGSVASQSIIAYTMSLGAENSVAYSNNSIAIPTNFTISVTTEILPVSMTKTSVDCTMYICGDSTECSNLLLQYGSFCTQLNRALTGIAVEQDKNTQEVFAQVKQIYKTPPIKDFGGFNFSQILPDPSKPSKRSFIEDLLFNKVTLADAGFIKQYGDCLGDIAARDLICAQKFNGLTVLPPLLTDEMIAQYTSALLAGTITSGWTFGAGAALQIPFAMQMAYRFNGIGVTQNVLYENQKLIANQFNSAIGKIQDSLSSTASALGKLQDVVNQNAQALNTLVKQLSSNFGAISSVLNDILSRLDPPEAEVQIDRLITGRLQSLQTYVTQQLIRAAEIRASANLAATKMSECVLGQSKRVDFCGKGYHLMSFPQSAPHGVVFLHVTYVPAQEKNFTTAPAICHDGKAHFPREGVFVSNGTHWFVTQRNFYEPQIITTDNTFVSGNCDVVIGIVNNTVYDPLQPELDSFKEELDKYFKNHTSPDVDLGDISGINASVVNIQKEIDRLNEVAKNLNESLIDLQELGKYEQGSGYIPEAPRDGQAYVRKDGEWVLLSTFLGRSLEVLFQGPGSLPETGGGSDYKDDDDKGGGGSGGGGSGGGGSGGGGSGGGGSHHHHHH

SEQ ID NO: 16 - protein, 1297 aa, Artificial Sequence
  source: /note="Description of Artificial Sequence: Synthetic polypeptide"
MFVFLVLLPLVSSQCVNLTTRTQLPPAYTNSFTRGVYYPDKVFRSSVLHSTQDLFLPFFSNVTWFHAIHVSGTNGTKRFDNPVLPFNDGVYFASTEKSNIIRGWIFGTTLDSKTQSLLIVNNATNVVIKVCEFQFCNDPFLGVYYHKNNKSWMESEFRVYSSANNCTFEYVSQPFLMDLEGKQGNFKNLREFVFKNIDGYFKIYSKHTPINLVRDLPQGFSALEPLVDLPIGINITRFQTLLALHRSYLTPGDSSSGWTAGAAAYYVGYLQPRTFLLKYNENGTITDAVDCALDPLSETKCTLKSFTVEKGIYQTSNFRVQPTESIVRFPNITNLCPFGEVFNATRFASVYAWNRKRISNCVADYSVLYNSASFSTFKCYGVSPTKLNDLCFTNVYADSFVIRGDEVRQIAPGQTGKIADYNYKLPDDFTGCVIAWNSNNLDSKVGGNYNYLYRLFRKSNLKPFERDISTEIYQAGSTPCNGVEGFNCYFPLQSYGFQPTNGVGYQPYRVVVLSFELLHAPATVCGPKKSTPLVKNKCVNFNFNGLTGTGVLTESNKKFLPFQQFGRDIADTTDAVRDPQTLEILDITPCSFGGVSVITPGTNTSNQVAVLYQDVNCTEVPVAIHADQLTPTWRVYSTGSNVFQTRAGCLIGAEHVNNSYECDIPIGAGICASYQTQTNSPSRAGSVASQSIIAYTMSLGAENSVAYSNNSIAIPTNFTISVTTEILPVSMTKTSVDCTMYICGDSTECSNLLLQYGSFCTQLNRALTGIAVEQDKNTQEVFAQVKQIYKTPPIKDFGGFNFSQILPDPSKPSKRSFIEDLLFNKVTLADAGFIKQYGDCLGDIAARDLICAQKFNGLTVLPPLLTDEMIAQYTSALLAGTITSGWTFGAGAALQIPFAMQMAYRFNGIGVTQNVLYENQKLIANQFNSAIGKIQDSLSSTASALGKLQDVVNQNAQALNTLVKQLSSNFGAISSVLNDILSRLDPPEAEVQIDRLITGRLQSLQTYVTQQLIRAAEIRASANLAATKMSECVLGQSKRVDFCGKGYHLMSFPQSAPHGVVFLHVTYVPAQEKNFTTAPAICHDGKAHFPREGVFVSNGTHWFVTQRNFYEPQIITTDNTFVSGNCDVVIGIVNNTVYDPLQPELDSFKEELDKYFKNHTSPDVDLGDISGINASVVNIQKEIDRLNEVAKNLNESLIDLQELGKYEQGSGYIPEAPRDGQAYVRKDGEWVLLSTFLGRSLEVLFQGPGSLPETGGGSDYKDDDDKGGGGSGGGGSGGGGSGGGGSGGGGSHHHHHH

SEQ ID NO: 17 - protein, 1297 aa, Artificial Sequence
  source: /note="Description of Artificial Sequence: Synthetic polypeptide"
MFVFLVLLPLVSSQCVNLTTRTQLPPAYTNSFTRGVYYPDKVFRSSVLHSTQDLFLPFFSNVTWFHAIHVSGTNGTKRFDNPVLPFNDGVYFASTEKSNIIRGWIFGTTLDSKTQSLLIVNNATNVVIKVCEFQFCNDPFLGVYYHKNNKSWMESEFRVYSSANNCTFEYVSQPFLMDLEGKQGNFKNLREFVFKNIDGYFKIYSKHTPINLVRDLPQGFSALEPLVDLPIGINITRFQTLLALHRSYLTPGDSSSGWTAGAAAYYVGYLQPRTFLLKYNENGTITDAVDCALDPLSETKCTLKSFTVEKGIYQTSNFRVQPTESIVRFPNITNLCPFGEVFNATRFASVYAWNRKRISNCVADYSVLYNSASFSTFKCYGVSPTKLNDLCFTNVYADSFVIRGDEVRQIAPGQTGKIADYNYKLPDDFTGCVIAWNSNNLDSKVGGNYNYLYRLFRKSNLKPFERDISTEIYQAGSTPCNGVEGFNCYFPLQSYGFQPTNGVGYQPYRVVVLSFELLHAPATVCGPKKSTNLVKNKCVNFNFNGLTGTGVLTESNKKFLPFQQFGRDIADTTDAVRDPQTLEILDITPCSFGGVSVITPGTNTSNQVAVLYQDVNCTEVPVAIHADQLTPTWRVYSTGSNVFQTRAGCLIGAEHVNNSYECDIPIGAGICASYQTQTNSPSRAGSVASQSIIAYTMSLGAENSVAYSNNSIAIPTNFTISVTTEILPVSMTKTSVDCTMYICGDSTECSNLLLQYGSFCTQLNRALTGIAVEQDKNTQEVFAQVKQIYKTPPIKDFGGFNFSQILPDPSKPSKRSFIEDLLFNKVTLADAGFIKQYGDCLGDIAARDLICAQKFNGLTVLPPLLTDEMIAQYTSALLACTITSGWTCGAGAALQIPFAMQMAYRFNGIGVTQNVLYENQKLIANQFNSAIGKIQDSLSSTASALGKLQDVVNQNAQALNTLVKQLSSNFGAISSVLNDILSRLDPPEAEVQIDRLITGRLQSLQTYVTQQLIRAAEIRASANLAATKMSECVLGQSKRVDFCGKGYHLMSFPQSAPHGVVFLHVTYVPAQEKNFTTAPAICHDGKAHFPREGVFVSNGTHWFVTQRNFYEPQIITTDNTFVSGNCDVVIGIVNNTVYDPLQPELDSFKEELDKYFKNHTSPDVDLGDISGINASVVNIQKEIDRLNEVAKNLNESLIDLQELGKYEQGSGYIPEAPRDGQAYVRKDGEWVLLSTFLGRSLEVLFQGPGSLPETGGGSDYKDDDDKGGGGSGGGGSGGGGSGGGGSGGGGSHHHHHH

SEQ ID NO: 18 - protein, 1297 aa, Artificial Sequence
  source: /note="Description of Artificial Sequence: Synthetic polypeptide"
MFVFLVLLPLVSSQCVNLTTRTQLPPAYTNSFTRGVYYPDKVFRSSVLHSTQDLFLPFFSNVTWFHAIHVSGTNGTKRFDNPVLPFNDGVYFASTEKSNIIRGWIFGTTLDSKTQSLLIVNNATNVVIKVCEFQFCNDPFLGVYYHKNNKSWMESEFRVYSSANNCTFEYVSQPFLMDLEGKQGNFKNLREFVFKNIDGYFKIYSKHTPINLVRDLPQGFSALEPLVDLPIGINITRFQTLLALHRSYLTPGDSSSGWTAGAAAYYVGYLQPRTFLLKYNENGTITDAVDCALDPLSETKCTLKSFTVEKGIYQTSNFRVQPTESIVRFPNITNLCPFGEVFNATRFASVYAWNRKRISNCVADYSVLYNSASFSTFKCYGVSPTKLNDLCFTNVYADSFVIRGDEVRQIAPGQTGKIADYNYKLPDDFTGCVIAWNSNNLDSKVGGNYNYLYRLFRKSNLKPFERDISTEIYQAGSTPCNGVEGFNCYFPLQSYGFQPTNGVGYQPYRVVVLSFELLHAPATVCGPKKSTNLVKNKCVNFNFNGLTGTGVLTESNKKFLPFQQFGRDIADTTDAVRDPQTLEILDITPCSFGGVSVITPGTNTSNQVAVLYQDVNCTEVPVAIHADQLTPTWRVYSTGSNVFQTRAGCLIGAEHVNNSYECDIPIGAGICASYQTQTNSPSRAGSVASQSIIAYTMSLGAENSVAYSNNSIAIPTNFTISVTTEILPVSMTKTSVDCTMYICGDSTECSNLLLQYGSFCTQLNRALTGIAVEQDKNTQEVFAQVKQIYKTPPIKDFGGFNFSQILPDPSKPSKRSFIEDLLFNKVTLADAGFIKQYGDCLGDIAARDLICAQKFNGLTVLPPLLTDEMIAQYTSALLAGTITCGWTFGAGACLQIPFAMQMAYRFNGIGVTQNVLYENQKLIANQFNSAIGKIQDSLSSTASALGKLQDVVNQNAQALNTLVKQLSSNFGAISSVLNDILSRLDPPEAEVQIDRLITGRLQSLQTYVTQQLIRAAEIRASANLAATKMSECVLGQSKRVDFCGKGYHLMSFPQSAPHGVVFLHVTYVPAQEKNFTTAPAICHDGKAHFPREGVFVSNGTHWFVTQRNFYEPQIITTDNTFVSGNCDVVIGIVNNTVYDPLQPELDSFKEELDKYFKNHTSPDVDLGDISGINASVVNIQKEIDRLNEVAKNLNESLIDLQELGKYEQGSGYIPEAPRDGQAYVRKDGEWVLLSTFLGRSLEVLFQGPGSLPETGGGSDYKDDDDKGGGGSGGGGSGGGGSGGGGSGGGGSHHHHHH

SEQ ID NO: 19 - protein, 1297 aa, Artificial Sequence
  source: /note="Description of Artificial Sequence: Synthetic polypeptide"
MFVFLVLLPLVSSQCVNLTTRTQLPPAYTNSFTRGVYYPDKVFRSSVLHSTQDLFLPFFSNVTWFHAIHVSGTNGTKRFDNPVLPFNDGVYFASTEKSNIIRGWIFGTTLDSKTQSLLIVNNATNVVIKVCEFQFCNDPFLGVYYHKNNKSWMESEFRVYSSANNCTFEYVSQPFLMDLEGKQGNFKNLREFVFKNIDGYFKIYSKHTPINLVRDLPQGFSALEPLVDLPIGINITRFQTLLALHRSYLTPGDSSSGWTAGAAAYYVGYLQPRTFLLKYNENGTITDAVDCALDPLSETKCTLKSFTVEKGIYQTSNFRVQPTESIVRFPNITNLCPFGEVFNATRFASVYAWNRKRISNCVADYSVLYNSASFSTFKCYGVSPTKLNDLCFTNVYADSFVIRGDEVRQIAPGQTGKIADYNYKLPDDFTGCVIAWNSNNLDSKVGGNYNYLYRLFRKSNLKPFERDISTEIYQAGSTPCNGVEGFNCYFPLQSYGFQPTNGVGYQPYRVVVLSFELLHAPATVCGPKKSTNLVKNKCVNFNFNGLTGTGVLTESNKKFLPFQQFGRDIADTTDAVRDPQTLEILDITPCSFGGVSVITPGTNTSNQVAVLYQDVNCTEVPVAIHADQLTPTWRVYSTGSNVFQTRAGCLIGAEHVNNSYECDIPIGAGICASYQTQTNSPSRAGSVASQSIIAYTMSLGAENSVAYSNNSIAIPTNFTISVTTEILPVSMTKTSVDCTMYICGDSTECSNLLLQYGSFCTQLNRALTGIAVEQDKNTQEVFAQVKQIYKTPPIKDFGGFNFSQILPDPSKPSKRSFIEDLLFNKVTLADAGFIKQYGDCLGDIAARDLICAQKFNGLTVLPPLLTDEMIAQYTSALLAGTITSGWTFGAGPALQIPFAMQMAYRFNGIGVTQNVLYENQKLIANQFNSAIGKIQDSLSSTPSALGKLQDVVNQNAQALNTLVKQLSSNFGAISSVLNDILSRLDKVEAEVQIDRLITGRLQSLQTYVTQQLIRAAEIRASANLAATKMSECVLGQSKRVDFCGKGYHLMSFPQSAPHGVVFLHVTYVPAQEKNFTTAPAICHDGKAHFPREGVFVSNGTHWFVTQRNFYEPQIITTDNTFVSGNCDVVIGIVNNTVYDPLQPELDSFKEELDKYFKNHTSPDVDLGDISGINASVVNIQKEIDRLNEVAKNLNESLIDLQELGKYEQGSGYIPEAPRDGQAYVRKDGEWVLLSTFLGRSLEVLFQGPGSLPETGGGSDYKDDDDKGGGGSGGGGSGGGGSGGGGSGGGGSHHHHHH

SEQ ID NO: 20 - protein, 1297 aa, Artificial Sequence
  source: /note="Description of Artificial Sequence: Synthetic polypeptide"
MFVFLVLLPLVSSQCVNLTTRTQLPPAYTNSFTRGVYYPDKVFRSSVLHSTQDLFLPFFSNVTWFHAIHVSGTNGTKRFDNPVLPFNDGVYFASTEKSNIIRGWIFGTTLDSKTQSLLIVNNATNVVIKVCEFQFCNDPFLGVYYHKNNKSWMESEFRVYSSANNCTFEYVSQPFLMDLEGKQGNFKNLREFVFKNIDGYFKIYSKHTPINLVRDLPQGFSALEPLVDLPIGINITRFQTLLALHRSYLTPGDSSSGWTAGAAAYYVGYLQPRTFLLKYNENGTITDAVDCALDPLSETKCTLKSFTVEKGIYQTSNFRVQPTESIVRFPNITNLCPFGEVFNATRFASVYAWNRKRISNCVADYSVLYNSASFSTFKCYGVSPTKLNDLCFTNVYADSFVIRGDEVRQIAPGQTGKIADYNYKLPDDFTGCVIAWNSNNLDSKVGGNYNYLYRLFRKSNLKPFERDISTEIYQAGSTPCNGVEGFNCYFPLQSYGFQPTNGVGYQPYRVVVLSFELLHAPATVCGPKKSTNLVKNKCVNFNFNGLTGTGVLTESNKKFLPFQQFGRDIADTTDAVRDPQTLEILDITPCSFGGVSVITPGTNTSNQVAVLYQNVNCTEVPVAIHADQLTPTWRVYSTGSNVFQTRAGCLIGAEHVNNSYECDIPIGAGICASYQTQTNSPSRAGSVASQSIIAYTMSLGAENSVAYSNNSIAIPTNFTISVTTEILPVSMTKTSVDCTMYICGDSTECSNLLLQYGSFCTQLNRALTGIAVEQDKNTQEVFAQVKQIYKTPPIKDFGGFNFSQILPDPSKPSKRSFIEDLLFNKVTLADAGFIKQYGDCLGDIAARDLICAQKFNGLTVLPPLLTDEMIAQYTSALLAGTITSGWTFGAGAALQIPFAMQMAYRFNGIGVTQNVLYENQKLIANQFNSAIGKIQDSLSSTPSALGKLQDVVNQNAQALNTLVKQLSSNFGAISSVLNDILSRLDKVEAEVQIDRLITGRLQSLQTYVTQQLIRAAEIRASANLAATKMSECVLGQSKRVDFCGKGYHLMSFPQSAPHGVVFLHVTYVPAQEKNFTTAPAICHDGKAHFPREGVFVSNGTHWFVTQRNFYEPQIITTDNTFVSGNCDVVIGIVNNTVYDPLQPELDSFKEELDKYFKNHTSPDVDLGDISGINASVVNIQKEIDRLNEVAKNLNESLIDLQELGKYEQGSGYIPEAPRDGQAYVRKDGEWVLLSTFLGRSLEVLFQGPGSLPETGGGSDYKDDDDKGGGGSGGGGSGGGGSGGGGSGGGGSHHHHHH

SEQ ID NO: 21 - protein, 1297 aa, Artificial Sequence
  source: /note="Description of Artificial Sequence: Synthetic polypeptide"
MFVFLVLLPLVSSQCVNLTTRTQLPPAYTNSFTRGVYYPDKVFRSSVLHSTQDLFLPFFSNVTWFHAIHVSGTNGTKRFDNPVLPFNDGVYFASTEKSNIIRGWIFGTTLDSKTQSLLIVNNATNVVIKVCEFQFCNDPFLGVYYHKNNKSWMESEFRVYSSANNCTFEYVSQPFLMDLEGKQGNFKNLREFVFKNIDGYFKIYSKHTPINLVRDLPQGFSALEPLVDLPIGINITRFQTLLALHRSYLTPGDSSSGWTAGAAAYYVGYLQPRTFLLKYNENGTITDAVDCALDPLSETKCTLKSFTVEKGIYQTSNFRVQPTESIVRFPNITNLCPFGEVFNATRFASVYAWNRKRISNCVADYSVLYNSASFSTFKCYGVSPTKLNDLCFTNVYADSFVIRGDEVRQIAPGQTGKIADYNYKLPDDFTGCVIAWNSNNLDSKVGGNYNYLYRLFRKSNLKPFERDISTEIYQAGSTPCNGVEGFNCYFPLQSYGFQPTNGVGYQPYRVVVLSFELLHAPATVCGPKKSTNLVKNKCVNFNFNGLTGTGVLTESNKKFLPFQQFGRDIADITDAVRDPQTLEILDITPCSFGGVSVITPGTNTSNQVAVLYQDVNCTEVPVAIHADQLTPTWRVYSTGSNVFQTRAGCLIGAEHVNNSYECDIPIGAGICASYQTQTNSPSRAGSVASQSIIAYTMSLGAENSVAYSNNSIAIPTNFTISVTTEILPVSMTKTSVDCTMYICGDSTECSNLLLQYGSFCTQLNRALTGIAVEQDKNTQEVFAQVKQIYKTPPIKDFGGFNFSQILPDPSKPSKRSFIEDLLFNKVTLADAGFIKQYGDCLGDIAARDLICAQKFNGLTVLPPLLTDEMIAQYTSALLAGTITSGWTFGAGAALQIPFAMQMAYRFNGIGVTQNVLYENQKLIANQFNSAIGKIQDSLSSTPSALGKLQDVVNQNAQALNTLVKQLSSNFGAISSVLNDILSRLDKVEAEVQIDRLITGRLQSLQTYVTQQLIRAAEIRASANLAATKMSECVLGQSKRVDFCGKGYHLMSFPQSAPHGVVFLHVTYVPAQEKNFTTAPAICHDGKAHFPREGVFVSNGTHWFVTQRNFYEPQIITTDNTFVSGNCDVVIGIVNNTVYDPLQPELDSFKEELDKYFKNHTSPDVDLGDISGINASVVNIQKEIDRLNEVAKNLNESLIDLQELGKYEQGSGYIPEAPRDGQAYVRKDGEWVLLSTFLGRSLEVLFQGPGSLPETGGGSDYKDDDDKGGGGSGGGGSGGGGSGGGGSGGGGSHHHHHH

SEQ ID NO: 22 - protein, 1297 aa, Artificial Sequence
  source: /note="Description of Artificial Sequence: Synthetic polypeptide"
MFVFLVLLPLVSSQCVNLTTRTQLPPAYTNSFTRGVYYPDKVFRSSVLHSTQDLFLPFFSNVTWFHAIHVSGTNGTKRFDNPVLPFNDGVYFASTEKSNIIRGWIFGTTLDSKTQSLLIVNNATNVVIKVCEFQFCNDPFLGVYYHKNNKSWMESEFRVYSSANNCTFEYVSQPFLMDLEGKQGNFKNLREFVFKNIDGYFKIYSKHTPINLVRDLPQGFSALEPLVDLPIGINITRFQTLLALHRSYLTPGDSSSGWTAGAAAYYVGYLQPRTFLLKYNENGTITDAVDCALDPLSETKCTLKSFTVEKGIYQTSNFRVQPTESIVRFPNITNLCPFGEVFNATRFASVYAWNRKRISNCVADYSVLYNSASFSTFKCYGVSPTKLNDLCFTNVYADSFVIRGDEVRQIAPGQTGKIADYNYKLPDDFTGCVIAWNSNNLDSKVGGNYNYLYRLFRKSNLKPFERDISTEIYQAGSTPCNGVEGFNCYFPLQSYGFQPTNGVGYQPYRVVVLSFELLHAPATVCGPKKSTPLVKNKCVNFNFNGLTGTGVLTESNKKFLPFQQFGRDIADTTDAVRDPQTLEILDITPCSFGGVSVITPGTNTSNQVAVLYQDVNCTEVPVAIHADQLTPTWRVYSTGSNVFQTRAGCLIGAEHVNNSYECDIPIGAGICASYQTQTNSPSRAGSVASQSIIAYTMSLGAENSVAYSNNSIAIPTNFTISVTTEILPVSMTKTSVDCTMYICGDSTECSNLLLQYGSFCTQLNRALTGIAVEQDKNTQEVFAQVKQIYKTPPIKDFGGFNFSQILPDPSKPSKRSFIEDLLFNKVTLADAGFIKQYGDCLGDIAARDLICAQKFNGLTVLPPLLTDEMIAQYTSALLAGTITSGWTFGAGAALQIPFAMQMAYRFNGIGVTQNVLYENQKLIANQFNSAIGKIQDSLSSTPSALGKLQDVVNQNAQALNTLVKQLSSNFGAISSVLNDILSRLDKVEAEVQIDRLITGRLQSLQTYVTQQLIRAAEIRASANLAATKMSECVLGQSKRVDFCGKGYHLMSFPQSAPHGVVFLHVTYVPAQEKNFTTAPAICHDGKAHFPREGVFVSNGTHWFVTQRNFYEPQIITTDNTFVSGNCDVVIGIVNNTVYDPLQPELDSFKEELDKYFKNHTSPDVDLGDISGINASVVNIQKEIDRLNEVAKNLNESLIDLQELGKYEQGSGYIPEAPRDGQAYVRKDGEWVLLSTFLGRSLEVLFQGPGSLPETGGGSDYKDDDDKGGGGSGGGGSGGGGSGGGGSGGGGSHHHHHH

SEQ ID NO: 23 - protein, 1297 aa, Artificial Sequence
  source: /note="Description of Artificial Sequence: Synthetic polypeptide"
MFVFLVLLPLVSSQCVNLTTRTQLPPAYTNSFTRGVYYPDKVFRSSVLHSTQDLFLPFFSNVTWFHAIHVSGTNGTKRFDNPVLPFNDGVYFASTEKSNIIRGWIFGTTLDSKTQSLLIVNNATNVVIKVCEFQFCNDPFLGVYYHKNNKSWMESEFRVYSSANNCTFEYVSQPFLMDLEGKQGNFKNLREFVFKNIDGYFKIYSKHTPINLVRDLPQGFSALEPLVDLPIGINITRFQTLLALHRSYLTPGDSSSGWTAGAAAYYVGYLQPRTFLLKYNENGTITDAVDCALDPLSETKCTLKSFTVEKGIYQTSNFRVQPTESIVRFPNITNLCPFGEVFNATRFASVYAWNRKRISNCVADYSVLYNSASFSTFKCYGVSPTKLNDLCFTNVYADSFVIRGDEVRQIAPGQTGKIADYNYKLPDDFTGCVIAWNSNNLDSKVGGNYNYLYRLFRKSNLKPFERDISTEIYQAGSTPCNGVEGFNCYFPLQSYGFQPTNGVGYQPYRVVVLSFELLHAPATVCGPKKSTNLVKNKCVNFNFNGLTGTGVLTESNKKFLPFQQFGRDIADTTDAVRDPQTLEILDITPCSFGGVSVITPGTNTSNQVAVLYQDVNCTEVPVAIHADQLTPTWRVYSTGSNVFQTRAGCLIGAEHVNNSYECDIPIGAGICASYQTQTNSPSRAGSVASQSIIAYTMSLGAENSVAYSNNSIAIPTNFTISVTTEILPVSMTKTSVDCTMYICGDSTECSNLLLQYGSFCTQLNRALTGIAVEQDKNTQEVFAQVKQIYKTPPIKDFGGFNFSQILPDPSKPSKRSFIEDLLFNKVTLADAGFIKQYGDCLGDIAARDLICAQKFNGLTVLPPLLTDEMIAQYTSALLACTITSGWTCGAGAALQIPFAMQMAYRFNGIGVTQNVLYENQKLIANQFNSAIGKIQDSLSSTPSALGKLQDVVNQNAQALNTLVKQLSSNFGAISSVLNDILSRLDKVEAEVQIDRLITGRLQSLQTYVTQQLIRAAEIRASANLAATKMSECVLGQSKRVDFCGKGYHLMSFPQSAPHGVVFLHVTYVPAQEKNFTTAPAICHDGKAHFPREGVFVSNGTHWFVTQRNFYEPQIITTDNTFVSGNCDVVIGIVNNTVYDPLQPELDSFKEELDKYFKNHTSPDVDLGDISGINASVVNIQKEIDRLNEVAKNLNESLIDLQELGKYEQGSGYIPEAPRDGQAYVRKDGEWVLLSTFLGRSLEVLFQGPGSLPETGGGSDYKDDDDKGGGGSGGGGSGGGGSGGGGSGGGGSHHHHHH

SEQ ID NO: 24 - protein, 1297 aa, Artificial Sequence
  source: /note="Description of Artificial Sequence: Synthetic polypeptide"
MFVFLVLLPLVSSQCVNLTTRTQLPPAYTNSFTRGVYYPDKVFRSSVLHSTQDLFLPFFSNVTWFHAIHVSGTNGTKRFDNPVLPFNDGVYFASTEKSNIIRGWIFGTTLDSKTQSLLIVNNATNVVIKVCEFQFCNDPFLGVYYHKNNKSWMESEFRVYSSANNCTFEYVSQPFLMDLEGKQGNFKNLREFVFKNIDGYFKIYSKHTPINLVRDLPQGFSALEPLVDLPIGINITRFQTLLALHRSYLTPGDSSSGWTAGAAAYYVGYLQPRTFLLKYNENGTITDAVDCALDPLSETKCTLKSFTVEKGIYQTSNFRVQPTESIVRFPNITNLCPFGEVFNATRFASVYAWNRKRISNCVADYSVLYNSASFSTFKCYGVSPTKLNDLCFTNVYADSFVIRGDEVRQIAPGQTGKIADYNYKLPDDFTGCVIAWNSNNLDSKVGGNYNYLYRLFRKSNLKPFERDISTEIYQAGSTPCNGVEGFNCYFPLQSYGFQPTNGVGYQPYRVVVLSFELLHAPATVCGPKKSTNLVKNKCVNFNFNGLTGTGVLTESNKKFLPFQQFGRDIADTTDAVRDPQTLEILDITPCSFGGVSVITPGTNTSNQVAVLYQDVNCTEVPVAIHADQLTPTWRVYSTGSNVFQTRAGCLIGAEHVNNSYECDIPIGAGICASYQTQTNSPSRAGSVASQSIIAYTMSLGAENSVAYSNNSIAIPTNFTISVTTEILPVSMTKTSVDCTMYICGDSTECSNLLLQYGSFCTQLNRALTGIAVEQDKNTQEVFAQVKQIYKTPPIKDFGGFNFSQILPDPSKPSKRSFIEDLLFNKVTLADAGFIKQYGDCLGDIAARDLICAQKFNGLTVLPPLLTDEMIAQYTSALLAGTITCGWTFGAGACLQIPFAMQMAYRFNGIGVTQNVLYENQKLIANQFNSAIGKIQDSLSSTPSALGKLQDVVNQNAQALNTLVKQLSSNFGAISSVLNDILSRLDKVEAEVQIDRLITGRLQSLQTYVTQQLIRAAEIRASANLAATKMSECVLGQSKRVDFCGKGYHLMSFPQSAPHGVVFLHVTYVPAQEKNFTTAPAICHDGKAHFPREGVFVSNGTHWFVTQRNFYEPQIITTDNTFVSGNCDVVIGIVNNTVYDPLQPELDSFKEELDKYFKNHTSPDVDLGDISGINASVVNIQKEIDRLNEVAKNLNESLIDLQELGKYEQGSGYIPEAPRDGQAYVRKDGEWVLLSTFLGRSLEVLFQGPGSLPETGGGSDYKDDDDKGGGGSGGGGSGGGGSGGGGSGGGGSHHHHHH

SEQ ID NO: 25 - protein, 1297 aa, Artificial Sequence
  source: /note="Description of Artificial Sequence: Synthetic polypeptide"
MFVFLVLLPLVSSQCVNLTTRTQLPPAYTNSFTRGVYYPDKVFRSSVLHSTQDLFLPFFSNVTWFHAIHVSGTNGTKRFDNPVLPFNDGVYFASTEKSNIIRGWIFGTTLDSKTQSLLIVNNATNVVIKVCEFQFCNDPFLGVYYHKNNKSWMESEFRVYSSANNCTFEYVSQPFLMDLEGKQGNFKNLREFVFKNIDGYFKIYSKHTPINLVRDLPQGFSALEPLVDLPIGINITRFQTLLALHRSYLTPGDSSSGWTAGAAAYYVGYLQPRTFLLKYNENGTITDAVDCALDPLSETKCTLKSFTVEKGIYQTSNFRVQPTESIVRFPNITNLCPFGEVFNATRFASVYAWNRKRISNCVADYSVLYNSASFSTFKCYGVSPTKLNDLCFTNVYADSFVIRGDEVRQIAPGQTGKIADYNYKLPDDFTGCVIAWNSNNLDSKVGGNYNYLYRLFRKSNLKPFERDISTEIYQAGSTPCNGVEGFNCYFPLQSYGFQPTNGVGYQPYRVVVLSFELLHAPATVCGPKKSTNLVKNKCVNFNFNGLTGTGVLTESNKKFLPFQQFGRDIADTTDAVRDPQTLEILDITPCSFGGVSVITPGTNTSNQVAVLYQNVNCTEVPVAIHADQLTPTWRVYSTGSNVFQTRAGCLIGAEHVNNSYECDIPIGAGICASYQTQTNSPSRAGSVASQSIIAYTMSLGAENSVAYSNNSIAIPTNFTISVTTEILPVSMTKTSVDCTMYICGDSTECSNLLLQYGSFCTQLNRALTGIAVEQDKNTQEVFAQVKQIYKTPPIKDFGGFNFSQILPDPSKPSKRSFIEDLLFNKVTLADAGFIKQYGDCLGDIAARDLICAQKFNGLTVLPPLLTDEMIAQYTSALLAGTITSGWTFGAGPALQIPFAMQMAYRFNGIGVTQNVLYENQKLIANQFNSAIGKIQDSLSSTASALGKLQDVVNQNAQALNTLVKQLSSNFGAISSVLNDILSRLDKVEAEVQIDRLITGRLQSLQTYVTQQLIRAAEIRASANLAATKMSECVLGQSKRVDFCGKGYHLMSFPQSAPHGVVFLHVTYVPAQEKNFTTAPAICHDGKAHFPREGVFVSNGTHWFVTQRNFYEPQIITTDNTFVSGNCDVVIGIVNNTVYDPLQPELDSFKEELDKYFKNHTSPDVDLGDISGINASVVNIQKEIDRLNEVAKNLNESLIDLQELGKYEQGSGYIPEAPRDGQAYVRKDGEWVLLSTFLGRSLEVLFQGPGSLPETGGGSDYKDDDDKGGGGSGGGGSGGGGSGGGGSGGGGSHHHHHH

SEQ ID NO: 26 - protein, 1297 aa, Artificial Sequence
  source: /note="Description of Artificial Sequence: Synthetic polypeptide"
MFVFLVLLPLVSSQCVNLTTRTQLPPAYTNSFTRGVYYPDKVFRSSVLHSTQDLFLPFFSNVTWFHAIHVSGTNGTKRFDNPVLPFNDGVYFASTEKSNIIRGWIFGTTLDSKTQSLLIVNNATNVVIKVCEFQFCNDPFLGVYYHKNNKSWMESEFRVYSSANNCTFEYVSQPFLMDLEGKQGNFKNLREFVFKNIDGYFKIYSKHTPINLVRDLPQGFSALEPLVDLPIGINITRFQTLLALHRSYLTPGDSSSGWTAGAAAYYVGYLQPRTFLLKYNENGTITDAVDCALDPLSETKCTLKSFTVEKGIYQTSNFRVQPTESIVRFPNITNLCPFGEVFNATRFASVYAWNRKRISNCVADYSVLYNSASFSTFKCYGVSPTKLNDLCFTNVYADSFVIRGDEVRQIAPGQTGKIADYNYKLPDDFTGCVIAWNSNNLDSKVGGNYNYLYRLFRKSNLKPFERDISTEIYQAGSTPCNGVEGFNCYFPLQSYGFQPTNGVGYQPYRVVVLSFELLHAPATVCGPKKSTNLVKNKCVNFNFNGLTGTGVLTESNKKFLPFQQFGRDIADITDAVRDPQTLEILDITPCSFGGVSVITPGTNTSNQVAVLYQDVNCTEVPVAIHADQLTPTWRVYSTGSNVFQTRAGCLIGAEHVNNSYECDIPIGAGICASYQTQTNSPSRAGSVASQSIIAYTMSLGAENSVAYSNNSIAIPTNFTISVTTEILPVSMTKTSVDCTMYICGDSTECSNLLLQYGSFCTQLNRALTGIAVEQDKNTQEVFAQVKQIYKTPPIKDFGGFNFSQILPDPSKPSKRSFIEDLLFNKVTLADAGFIKQYGDCLGDIAARDLICAQKFNGLTVLPPLLTDEMIAQYTSALLAGTITSGWTFGAGPALQIPFAMQMAYRFNGIGVTQNVLYENQKLIANQFNSAIGKIQDSLSSTASALGKLQDVVNQNAQALNTLVKQLSSNFGAISSVLNDILSRLDKVEAEVQIDRLITGRLQSLQTYVTQQLIRAAEIRASANLAATKMSECVLGQSKRVDFCGKGYHLMSFPQSAPHGVVFLHVTYVPAQEKNFTTAPAICHDGKAHFPREGVFVSNGTHWFVTQRNFYEPQIITTDNTFVSGNCDVVIGIVNNTVYDPLQPELDSFKEELDKYFKNHTSPDVDLGDISGINASVVNIQKEIDRLNEVAKNLNESLIDLQELGKYEQGSGYIPEAPRDGQAYVRKDGEWVLLSTFLGRSLEVLFQGPGSLPETGGGSDYKDDDDKGGGGSGGGGSGGGGSGGGGSGGGGSHHHHHH

SEQ ID NO: 27 - protein, 1297 aa, Artificial Sequence
  source: /note="Description of Artificial Sequence: Synthetic polypeptide"
MFVFLVLLPLVSSQCVNLTTRTQLPPAYTNSFTRGVYYPDKVFRSSVLHSTQDLFLPFFSNVTWFHAIHVSGTNGTKRFDNPVLPFNDGVYFASTEKSNIIRGWIFGTTLDSKTQSLLIVNNATNVVIKVCEFQFCNDPFLGVYYHKNNKSWMESEFRVYSSANNCTFEYVSQPFLMDLEGKQGNFKNLREFVFKNIDGYFKIYSKHTPINLVRDLPQGFSALEPLVDLPIGINITRFQTLLALHRSYLTPGDSSSGWTAGAAAYYVGYLQPRTFLLKYNENGTITDAVDCALDPLSETKCTLKSFTVEKGIYQTSNFRVQPTESIVRFPNITNLCPFGEVFNATRFASVYAWNRKRISNCVADYSVLYNSASFSTFKCYGVSPTKLNDLCFTNVYADSFVIRGDEVRQIAPGQTGKIADYNYKLPDDFTGCVIAWNSNNLDSKVGGNYNYLYRLFRKSNLKPFERDISTEIYQAGSTPCNGVEGFNCYFPLQSYGFQPTNGVGYQPYRVVVLSFELLHAPATVCGPKKSTPLVKNKCVNFNFNGLTGTGVLTESNKKFLPFQQFGRDIADTTDAVRDPQTLEILDITPCSFGGVSVITPGTNTSNQVAVLYQDVNCTEVPVAIHADQLTPTWRVYSTGSNVFQTRAGCLIGAEHVNNSYECDIPIGAGICASYQTQTNSPSRAGSVASQSIIAYTMSLGAENSVAYSNNSIAIPTNFTISVTTEILPVSMTKTSVDCTMYICGDSTECSNLLLQYGSFCTQLNRALTGIAVEQDKNTQEVFAQVKQIYKTPPIKDFGGFNFSQILPDPSKPSKRSFIEDLLFNKVTLADAGFIKQYGDCLGDIAARDLICAQKFNGLTVLPPLLTDEMIAQYTSALLAGTITSGWTFGAGPALQIPFAMQMAYRFNGIGVTQNVLYENQKLIANQFNSAIGKIQDSLSSTASALGKLQDVVNQNAQALNTLVKQLSSNFGAISSVLNDILSRLDKVEAEVQIDRLITGRLQSLQTYVTQQLIRAAEIRASANLAATKMSECVLGQSKRVDFCGKGYHLMSFPQSAPHGVVFLHVTYVPAQEKNFTTAPAICHDGKAHFPREGVFVSNGTHWFVTQRNFYEPQIITTDNTFVSGNCDVVIGIVNNTVYDPLQPELDSFKEELDKYFKNHTSPDVDLGDISGINASVVNIQKEIDRLNEVAKNLNESLIDLQELGKYEQGSGYIPEAPRDGQAYVRKDGEWVLLSTFLGRSLEVLFQGPGSLPETGGGSDYKDDDDKGGGGSGGGGSGGGGSGGGGSGGGGSHHHHHH

SEQ ID NO: 28 - protein, 1297 aa, Artificial Sequence
  source: /note="Description of Artificial Sequence: Synthetic polypeptide"
MFVFLVLLPLVSSQCVNLTTRTQLPPAYTNSFTRGVYYPDKVFRSSVLHSTQDLFLPFFSNVTWFHAIHVSGTNGTKRFDNPVLPFNDGVYFASTEKSNIIRGWIFGTTLDSKTQSLLIVNNATNVVIKVCEFQFCNDPFLGVYYHKNNKSWMESEFRVYSSANNCTFEYVSQPFLMDLEGKQGNFKNLREFVFKNIDGYFKIYSKHTPINLVRDLPQGFSALEPLVDLPIGINITRFQTLLALHRSYLTPGDSSSGWTAGAAAYYVGYLQPRTFLLKYNENGTITDAVDCALDPLSETKCTLKSFTVEKGIYQTSNFRVQPTESIVRFPNITNLCPFGEVFNATRFASVYAWNRKRISNCVADYSVLYNSASFSTFKCYGVSPTKLNDLCFTNVYADSFVIRGDEVRQIAPGQTGKIADYNYKLPDDFTGCVIAWNSNNLDSKVGGNYNYLYRLFRKSNLKPFERDISTEIYQAGSTPCNGVEGFNCYFPLQSYGFQPTNGVGYQPYRVVVLSFELLHAPATVCGPKKSTNLVKNKCVNFNFNGLTGTGVLTESNKKFLPFQQFGRDIADTTDAVRDPQTLEILDITPCSFGGVSVITPGTNTSNQVAVLYQDVNCTEVPVAIHADQLTPTWRVYSTGSNVFQTRAGCLIGAEHVNNSYECDIPIGAGICASYQTQTNSPSRAGSVASQSIIAYTMSLGAENSVAYSNNSIAIPTNFTISVTTEILPVSMTKTSVDCTMYICGDSTECSNLLLQYGSFCTQLNRALTGIAVEQDKNTQEVFAQVKQIYKTPPIKDFGGFNFSQILPDPSKPSKRSFIEDLLFNKVTLADAGFIKQYGDCLGDIAARDLICAQKFNGLTVLPPLLTDEMIAQYTSALLACTITSGWTCGAGPALQIPFAMQMAYRFNGIGVTQNVLYENQKLIANQFNSAIGKIQDSLSSTASALGKLQDVVNQNAQALNTLVKQLSSNFGAISSVLNDILSRLDKVEAEVQIDRLITGRLQSLQTYVTQQLIRAAEIRASANLAATKMSECVLGQSKRVDFCGKGYHLMSFPQSAPHGVVFLHVTYVPAQEKNFTTAPAICHDGKAHFPREGVFVSNGTHWFVTQRNFYEPQIITTDNTFVSGNCDVVIGIVNNTVYDPLQPELDSFKEELDKYFKNHTSPDVDLGDISGINASVVNIQKEIDRLNEVAKNLNESLIDLQELGKYEQGSGYIPEAPRDGQAYVRKDGEWVLLSTFLGRSLEVLFQGPGSLPETGGGSDYKDDDDKGGGGSGGGGSGGGGSGGGGSGGGGSHHHHHH

SEQ ID NO: 29 - protein, 1297 aa, Artificial Sequence
  source: /note="Description of Artificial Sequence: Synthetic polypeptide"
MFVFLVLLPLVSSQCVNLTTRTQLPPAYTNSFTRGVYYPDKVFRSSVLHSTQDLFLPFFSNVTWFHAIHVSGTNGTKRFDNPVLPFNDGVYFASTEKSNIIRGWIFGTTLDSKTQSLLIVNNATNVVIKVCEFQFCNDPFLGVYYHKNNKSWMESEFRVYSSANNCTFEYVSQPFLMDLEGKQGNFKNLREFVFKNIDGYFKIYSKHTPINLVRDLPQGFSALEPLVDLPIGINITRFQTLLALHRSYLTPGDSSSGWTAGAAAYYVGYLQPRTFLLKYNENGTITDAVDCALDPLSETKCTLKSFTVEKGIYQTSNFRVQPTESIVRFPNITNLCPFGEVFNATRFASVYAWNRKRISNCVADYSVLYNSASFSTFKCYGVSPTKLNDLCFTNVYADSFVIRGDEVRQIAPGQTGKIADYNYKLPDDFTGCVIAWNSNNLDSKVGGNYNYLYRLFRKSNLKPFERDISTEIYQAGSTPCNGVEGFNCYFPLQSYGFQPTNGVGYQPYRVVVLSFELLHAPATVCGPKKSTNLVKNKCVNFNFNGLTGTGVLTESNKKFLPFQQFGRDIADTTDAVRDPQTLEILDITPCSFGGVSVITPGTNTSNQVAVLYQDVNCTEVPVAIHADQLTPTWRVYSTGSNVFQTRAGCLIGAEHVNNSYECDIPIGAGICASYQTQTNSPSRAGSVASQSIIAYTMSLGAENSVAYSNNSIAIPTNFTISVTTEILPVSMTKTSVDCTMYICGDSTECSNLLLQYGSFCTQLNRALTGIAVEQDKNTQEVFAQVKQIYKTPPIKDFGGFNFSQILPDPSKPSKRSFIEDLLFNKVTLADAGFIKQYGDCLGDIAARDLICAQKFNGLTVLPPLLTDEMIAQYTSALLAGTITCGWTFGAGPCLQIPFAMQMAYRFNGIGVTQNVLYENQKLIANQFNSAIGKIQDSLSSTASALGKLQDVVNQNAQALNTLVKQLSSNFGAISSVLNDILSRLDKVEAEVQIDRLITGRLQSLQTYVTQQLIRAAEIRASANLAATKMSECVLGQSKRVDFCGKGYHLMSFPQSAPHGVVFLHVTYVPAQEKNFTTAPAICHDGKAHFPREGVFVSNGTHWFVTQRNFYEPQIITTDNTFVSGNCDVVIGIVNNTVYDPLQPELDSFKEELDKYFKNHTSPDVDLGDISGINASVVNIQKEIDRLNEVAKNLNESLIDLQELGKYEQGSGYIPEAPRDGQAYVRKDGEWVLLSTFLGRSLEVLFQGPGSLPETGGGSDYKDDDDKGGGGSGGGGSGGGGSGGGGSGGGGSHHHHHH

SEQ ID NO: 30 - protein, 1297 aa, Artificial Sequence
  source: /note="Description of Artificial Sequence: Synthetic polypeptide"
MFVFLVLLPLVSSQCVNLTTRTQLPPAYTNSFTRGVYYPDKVFRSSVLHSTQDLFLPFFSNVTWFHAIHVSGTNGTKRFDNPVLPFNDGVYFASTEKSNIIRGWIFGTTLDSKTQSLLIVNNATNVVIKVCEFQFCNDPFLGVYYHKNNKSWMESEFRVYSSANNCTFEYVSQPFLMDLEGKQGNFKNLREFVFKNIDGYFKIYSKHTPINLVRDLPQGFSALEPLVDLPIGINITRFQTLLALHRSYLTPGDSSSGWTAGAAAYYVGYLQPRTFLLKYNENGTITDAVDCALDPLSETKCTLKSFTVEKGIYQTSNFRVQPTESIVRFPNITNLCPFGEVFNATRFASVYAWNRKRISNCVADYSVLYNSASFSTFKCYGVSPTKLNDLCFTNVYADSFVIRGDEVRQIAPGQTGKIADYNYKLPDDFTGCVIAWNSNNLDSKVGGNYNYLYRLFRKSNLKPFERDISTEIYQAGSTPCNGVEGFNCYFPLQSYGFQPTNGVGYQPYRVVVLSFELLHAPATVCGPKKSTNLVKNKCVNFNFNGLTGTGVLTESNKKFLPFQQFGRDIADITDAVRDPQTLEILDITPCSFGGVSVITPGTNTSNQVAVLYQNVNCTEVPVAIHADQLTPTWRVYSTGSNVFQTRAGCLIGAEHVNNSYECDIPIGAGICASYQTQTNSPSRAGSVASQSIIAYTMSLGAENSVAYSNNSIAIPTNFTISVTTEILPVSMTKTSVDCTMYICGDSTECSNLLLQYGSFCTQLNRALTGIAVEQDKNTQEVFAQVKQIYKTPPIKDFGGFNFSQILPDPSKPSKRSFIEDLLFNKVTLADAGFIKQYGDCLGDIAARDLICAQKFNGLTVLPPLLTDEMIAQYTSALLAGTITSGWTFGAGAALQIPFAMQMAYRFNGIGVTQNVLYENQKLIANQFNSAIGKIQDSLSSTASALGKLQDVVNQNAQALNTLVKQLSSNFGAISSVLNDILSRLDKVEAEVQIDRLITGRLQSLQTYVTQQLIRAAEIRASANLAATKMSECVLGQSKRVDFCGKGYHLMSFPQSAPHGVVFLHVTYVPAQEKNFTTAPAICHDGKAHFPREGVFVSNGTHWFVTQRNFYEPQIITTDNTFVSGNCDVVIGIVNNTVYDPLQPELDSFKEELDKYFKNHTSPDVDLGDISGINASVVNIQKEIDRLNEVAKNLNESLIDLQELGKYEQGSGYIPEAPRDGQAYVRKDGEWVLLSTFLGRSLEVLFQGPGSLPETGGGSDYKDDDDKGGGGSGGGGSGGGGSGGGGSGGGGSHHHHHH

SEQ ID NO: 31 - protein, 1297 aa, Artificial Sequence
  source: /note="Description of Artificial Sequence: Synthetic polypeptide"
MFVFLVLLPLVSSQCVNLTTRTQLPPAYTNSFTRGVYYPDKVFRSSVLHSTQDLFLPFFSNVTWFHAIHVSGTNGTKRFDNPVLPFNDGVYFASTEKSNIIRGWIFGTTLDSKTQSLLIVNNATNVVIKVCEFQFCNDPFLGVYYHKNNKSWMESEFRVYSSANNCTFEYVSQPFLMDLEGKQGNFKNLREFVFKNIDGYFKIYSKHTPINLVRDLPQGFSALEPLVDLPIGINITRFQTLLALHRSYLTPGDSSSGWTAGAAAYYVGYLQPRTFLLKYNENGTITDAVDCALDPLSETKCTLKSFTVEKGIYQTSNFRVQPTESIVRFPNITNLCPFGEVFNATRFASVYAWNRKRISNCVADYSVLYNSASFSTFKCYGVSPTKLNDLCFTNVYADSFVIRGDEVRQIAPGQTGKIADYNYKLPDDFTGCVIAWNSNNLDSKVGGNYNYLYRLFRKSNLKPFERDISTEIYQAGSTPCNGVEGFNCYFPLQSYGFQPTNGVGYQPYRVVVLSFELLHAPATVCGPKKSTPLVKNKCVNFNFNGLTGTGVLTESNKKFLPFQQFGRDIADTTDAVRDPQTLEILDITPCSFGGVSVITPGTNTSNQVAVLYQNVNCTEVPVAIHADQLTPTWRVYSTGSNVFQTRAGCLIGAEHVNNSYECDIPIGAGICASYQTQTNSPSRAGSVASQSIIAYTMSLGAENSVAYSNNSIAIPTNFTISVTTEILPVSMTKTSVDCTMYICGDSTECSNLLLQYGSFCTQLNRALTGIAVEQDKNTQEVFAQVKQIYKTPPIKDFGGFNFSQILPDPSKPSKRSFIEDLLFNKVTLADAGFIKQYGDCLGDIAARDLICAQKFNGLTVLPPLLTDEMIAQYTSALLAGTITSGWTFGAGAALQIPFAMQMAYRFNGIGVTQNVLYENQKLIANQFNSAIGKIQDSLSSTASALGKLQDVVNQNAQALNTLVKQLSSNFGAISSVLNDILSRLDKVEAEVQIDRLITGRLQSLQTYVTQQLIRAAEIRASANLAATKMSECVLGQSKRVDFCGKGYHLMSFPQSAPHGVVFLHVTYVPAQEKNFTTAPAICHDGKAHFPREGVFVSNGTHWFVTQRNFYEPQIITTDNTFVSGNCDVVIGIVNNTVYDPLQPELDSFKEELDKYFKNHTSPDVDLGDISGINASVVNIQKEIDRLNEVAKNLNESLIDLQELGKYEQGSGYIPEAPRDGQAYVRKDGEWVLLSTFLGRSLEVLFQGPGSLPETGGGSDYKDDDDKGGGGSGGGGSGGGGSGGGGSGGGGSHHHHHH

SEQ ID NO: 32 - protein, 1297 aa, Artificial Sequence
  source: /note="Description of Artificial Sequence: Synthetic polypeptide"
MFVFLVLLPLVSSQCVNLTTRTQLPPAYTNSFTRGVYYPDKVFRSSVLHSTQDLFLPFFSNVTWFHAIHVSGTNGTKRFDNPVLPFNDGVYFASTEKSNIIRGWIFGTTLDSKTQSLLIVNNATNVVIKVCEFQFCNDPFLGVYYHKNNKSWMESEFRVYSSANNCTFEYVSQPFLMDLEGKQGNFKNLREFVFKNIDGYFKIYSKHTPINLVRDLPQGFSALEPLVDLPIGINITRFQTLLALHRSYLTPGDSSSGWTAGAAAYYVGYLQPRTFLLKYNENGTITDAVDCALDPLSETKCTLKSFTVEKGIYQTSNFRVQPTESIVRFPNITNLCPFGEVFNATRFASVYAWNRKRISNCVADYSVLYNSASFSTFKCYGVSPTKLNDLCFTNVYADSFVIRGDEVRQIAPGQTGKIADYNYKLPDDFTGCVIAWNSNNLDSKVGGNYNYLYRLFRKSNLKPFERDISTEIYQAGSTPCNGVEGFNCYFPLQSYGFQPTNGVGYQPYRVVVLSFELLHAPATVCGPKKSTNLVKNKCVNFNFNGLTGTGVLTESNKKFLPFQQFGRDIADTTDAVRDPQTLEILDITPCSFGGVSVITPGTNTSNQVAVLYQNVNCTEVPVAIHADQLTPTWRVYSTGSNVFQTRAGCLIGAEHVNNSYECDIPIGAGICASYQTQTNSPSRAGSVASQSIIAYTMSLGAENSVAYSNNSIAIPTNFTISVTTEILPVSMTKTSVDCTMYICGDSTECSNLLLQYGSFCTQLNRALTGIAVEQDKNTQEVFAQVKQIYKTPPIKDFGGFNFSQILPDPSKPSKRSFIEDLLFNKVTLADAGFIKQYGDCLGDIAARDLICAQKFNGLTVLPPLLTDEMIAQYTSALLACTITSGWTCGAGAALQIPFAMQMAYRFNGIGVTQNVLYENQKLIANQFNSAIGKIQDSLSSTASALGKLQDVVNQNAQALNTLVKQLSSNFGAISSVLNDILSRLDKVEAEVQIDRLITGRLQSLQTYVTQQLIRAAEIRASANLAATKMSECVLGQSKRVDFCGKGYHLMSFPQSAPHGVVFLHVTYVPAQEKNFTTAPAICHDGKAHFPREGVFVSNGTHWFVTQRNFYEPQIITTDNTFVSGNCDVVIGIVNNTVYDPLQPELDSFKEELDKYFKNHTSPDVDLGDISGINASVVNIQKEIDRLNEVAKNLNESLIDLQELGKYEQGSGYIPEAPRDGQAYVRKDGEWVLLSTFLGRSLEVLFQGPGSLPETGGGSDYKDDDDKGGGGSGGGGSGGGGSGGGGSGGGGSHHHHHH

SEQ ID NO: 33 - protein, 1297 aa, Artificial Sequence
  source: /note="Description of Artificial Sequence: Synthetic polypeptide"
MFVFLVLLPLVSSQCVNLTTRTQLPPAYTNSFTRGVYYPDKVFRSSVLHSTQDLFLPFFSNVTWFHAIHVSGTNGTKRFDNPVLPFNDGVYFASTEKSNIIRGWIFGTTLDSKTQSLLIVNNATNVVIKVCEFQFCNDPFLGVYYHKNNKSWMESEFRVYSSANNCTFEYVSQPFLMDLEGKQGNFKNLREFVFKNIDGYFKIYSKHTPINLVRDLPQGFSALEPLVDLPIGINITRFQTLLALHRSYLTPGDSSSGWTAGAAAYYVGYLQPRTFLLKYNENGTITDAVDCALDPLSETKCTLKSFTVEKGIYQTSNFRVQPTESIVRFPNITNLCPFGEVFNATRFASVYAWNRKRISNCVADYSVLYNSASFSTFKCYGVSPTKLNDLCFTNVYADSFVIRGDEVRQIAPGQTGKIADYNYKLPDDFTGCVIAWNSNNLDSKVGGNYNYLYRLFRKSNLKPFERDISTEIYQAGSTPCNGVEGFNCYFPLQSYGFQPTNGVGYQPYRVVVLSFELLHAPATVCGPKKSTNLVKNKCVNFNFNGLTGTGVLTESNKKFLPFQQFGRDIADTTDAVRDPQTLEILDITPCSFGGVSVITPGTNTSNQVAVLYQNVNCTEVPVAIHADQLTPTWRVYSTGSNVFQTRAGCLIGAEHVNNSYECDIPIGAGICASYQTQTNSPSRAGSVASQSIIAYTMSLGAENSVAYSNNSIAIPTNFTISVTTEILPVSMTKTSVDCTMYICGDSTECSNLLLQYGSFCTQLNRALTGIAVEQDKNTQEVFAQVKQIYKTPPIKDFGGFNFSQILPDPSKPSKRSFIEDLLFNKVTLADAGFIKQYGDCLGDIAARDLICAQKFNGLTVLPPLLTDEMIAQYTSALLAGTITCGWTFGAGACLQIPFAMQMAYRFNGIGVTQNVLYENQKLIANQFNSAIGKIQDSLSSTASALGKLQDVVNQNAQALNTLVKQLSSNFGAISSVLNDILSRLDKVEAEVQIDRLITGRLQSLQTYVTQQLIRAAEIRASANLAATKMSECVLGQSKRVDFCGKGYHLMSFPQSAPHGVVFLHVTYVPAQEKNFTTAPAICHDGKAHFPREGVFVSNGTHWFVTQRNFYEPQIITTDNTFVSGNCDVVIGIVNNTVYDPLQPELDSFKEELDKYFKNHTSPDVDLGDISGINASVVNIQKEIDRLNEVAKNLNESLIDLQELGKYEQGSGYIPEAPRDGQAYVRKDGEWVLLSTFLGRSLEVLFQGPGSLPETGGGSDYKDDDDKGGGGSGGGGSGGGGSGGGGSGGGGSHHHHHH

SEQ ID NO: 34 - protein, 1297 aa, Artificial Sequence
  source: /note="Description of Artificial Sequence: Synthetic polypeptide"
MFVFLVLLPLVSSQCVNLTTRTQLPPAYTNSFTRGVYYPDKVFRSSVLHSTQDLFLPFFSNVTWFHAIHVSGTNGTKRFDNPVLPFNDGVYFASTEKSNIIRGWIFGTTLDSKTQSLLIVNNATNVVIKVCEFQFCNDPFLGVYYHKNNKSWMESEFRVYSSANNCTFEYVSQPFLMDLEGKQGNFKNLREFVFKNIDGYFKIYSKHTPINLVRDLPQGFSALEPLVDLPIGINITRFQTLLALHRSYLTPGDSSSGWTAGAAAYYVGYLQPRTFLLKYNENGTITDAVDCALDPLSETKCTLKSFTVEKGIYQTSNFRVQPTESIVRFPNITNLCPFGEVFNATRFASVYAWNRKRISNCVADYSVLYNSASFSTFKCYGVSPTKLNDLCFTNVYADSFVIRGDEVRQIAPGQTGKIADYNYKLPDDFTGCVIAWNSNNLDSKVGGNYNYLYRLFRKSNLKPFERDISTEIYQAGSTPCNGVEGFNCYFPLQSYGFQPTNGVGYQPYRVVVLSFELLHAPATVCGPKKSTPLVKNKCVNFNFNGLTGTGVLTESNKKFLPFQQFGRDIADITDAVRDPQTLEILDITPCSFGGVSVITPGTNTSNQVAVLYQDVNCTEVPVAIHADQLTPTWRVYSTGSNVFQTRAGCLIGAEHVNNSYECDIPIGAGICASYQTQTNSPSRAGSVASQSIIAYTMSLGAENSVAYSNNSIAIPTNFTISVTTEILPVSMTKTSVDCTMYICGDSTECSNLLLQYGSFCTQLNRALTGIAVEQDKNTQEVFAQVKQIYKTPPIKDFGGFNFSQILPDPSKPSKRSFIEDLLFNKVTLADAGFIKQYGDCLGDIAARDLICAQKFNGLTVLPPLLTDEMIAQYTSALLAGTITSGWTFGAGAALQIPFAMQMAYRFNGIGVTQNVLYENQKLIANQFNSAIGKIQDSLSSTASALGKLQDVVNQNAQALNTLVKQLSSNFGAISSVLNDILSRLDKVEAEVQIDRLITGRLQSLQTYVTQQLIRAAEIRASANLAATKMSECVLGQSKRVDFCGKGYHLMSFPQSAPHGVVFLHVTYVPAQEKNFTTAPAICHDGKAHFPREGVFVSNGTHWFVTQRNFYEPQIITTDNTFVSGNCDVVIGIVNNTVYDPLQPELDSFKEELDKYFKNHTSPDVDLGDISGINASVVNIQKEIDRLNEVAKNLNESLIDLQELGKYEQGSGYIPEAPRDGQAYVRKDGEWVLLSTFLGRSLEVLFQGPGSLPETGGGSDYKDDDDKGGGGSGGGGSGGGGSGGGGSGGGGSHHHHHH

SEQ ID NO: 35 - protein, 1297 aa, Artificial Sequence
  source: /note="Description of Artificial Sequence: Synthetic polypeptide"
MFVFLVLLPLVSSQCVNLTTRTQLPPAYTNSFTRGVYYPDKVFRSSVLHSTQDLFLPFFSNVTWFHAIHVSGTNGTKRFDNPVLPFNDGVYFASTEKSNIIRGWIFGTTLDSKTQSLLIVNNATNVVIKVCEFQFCNDPFLGVYYHKNNKSWMESEFRVYSSANNCTFEYVSQPFLMDLEGKQGNFKNLREFVFKNIDGYFKIYSKHTPINLVRDLPQGFSALEPLVDLPIGINITRFQTLLALHRSYLTPGDSSSGWTAGAAAYYVGYLQPRTFLLKYNENGTITDAVDCALDPLSETKCTLKSFTVEKGIYQTSNFRVQPTESIVRFPNITNLCPFGEVFNATRFASVYAWNRKRISNCVADYSVLYNSASFSTFKCYGVSPTKLNDLCFTNVYADSFVIRGDEVRQIAPGQTGKIADYNYKLPDDFTGCVIAWNSNNLDSKVGGNYNYLYRLFRKSNLKPFERDISTEIYQAGSTPCNGVEGFNCYFPLQSYGFQPTNGVGYQPYRVVVLSFELLHAPATVCGPKKSTNLVKNKCVNFNFNGLTGTGVLTESNKKFLPFQQFGRDIADITDAVRDPQTLEILDITPCSFGGVSVITPGTNTSNQVAVLYQDVNCTEVPVAIHADQLTPTWRVYSTGSNVFQTRAGCLIGAEHVNNSYECDIPIGAGICASYQTQTNSPSRAGSVASQSIIAYTMSLGAENSVAYSNNSIAIPTNFTISVTTEILPVSMTKTSVDCTMYICGDSTECSNLLLQYGSFCTQLNRALTGIAVEQDKNTQEVFAQVKQIYKTPPIKDFGGFNFSQILPDPSKPSKRSFIEDLLFNKVTLADAGFIKQYGDCLGDIAARDLICAQKFNGLTVLPPLLTDEMIAQYTSALLACTITSGWTCGAGAALQIPFAMQMAYRFNGIGVTQNVLYENQKLIANQFNSAIGKIQDSLSSTASALGKLQDVVNQNAQALNTLVKQLSSNFGAISSVLNDILSRLDKVEAEVQIDRLITGRLQSLQTYVTQQLIRAAEIRASANLAATKMSECVLGQSKRVDFCGKGYHLMSFPQSAPHGVVFLHVTYVPAQEKNFTTAPAICHDGKAHFPREGVFVSNGTHWFVTQRNFYEPQIITTDNTFVSGNCDVVIGIVNNTVYDPLQPELDSFKEELDKYFKNHTSPDVDLGDISGINASVVNIQKEIDRLNEVAKNLNESLIDLQELGKYEQGSGYIPEAPRDGQAYVRKDGEWVLLSTFLGRSLEVLFQGPGSLPETGGGSDYKDDDDKGGGGSGGGGSGGGGSGGGGSGGGGSHHHHHH

SEQ ID NO: 36 - protein, 1297 aa, Artificial Sequence
  source: /note="Description of Artificial Sequence: Synthetic polypeptide"
MFVFLVLLPLVSSQCVNLTTRTQLPPAYTNSFTRGVYYPDKVFRSSVLHSTQDLFLPFFSNVTWFHAIHVSGTNGTKRFDNPVLPFNDGVYFASTEKSNIIRGWIFGTTLDSKTQSLLIVNNATNVVIKVCEFQFCNDPFLGVYYHKNNKSWMESEFRVYSSANNCTFEYVSQPFLMDLEGKQGNFKNLREFVFKNIDGYFKIYSKHTPINLVRDLPQGFSALEPLVDLPIGINITRFQTLLALHRSYLTPGDSSSGWTAGAAAYYVGYLQPRTFLLKYNENGTITDAVDCALDPLSETKCTLKSFTVEKGIYQTSNFRVQPTESIVRFPNITNLCPFGEVFNATRFASVYAWNRKRISNCVADYSVLYNSASFSTFKCYGVSPTKLNDLCFTNVYADSFVIRGDEVRQIAPGQTGKIADYNYKLPDDFTGCVIAWNSNNLDSKVGGNYNYLYRLFRKSNLKPFERDISTEIYQAGSTPCNGVEGFNCYFPLQSYGFQPTNGVGYQPYRVVVLSFELLHAPATVCGPKKSTNLVKNKCVNFNFNGLTGTGVLTESNKKFLPFQQFGRDIADITDAVRDPQTLEILDITPCSFGGVSVITPGTNTSNQVAVLYQDVNCTEVPVAIHADQLTPTWRVYSTGSNVFQTRAGCLIGAEHVNNSYECDIPIGAGICASYQTQTNSPSRAGSVASQSIIAYTMSLGAENSVAYSNNSIAIPTNFTISVTTEILPVSMTKTSVDCTMYICGDSTECSNLLLQYGSFCTQLNRALTGIAVEQDKNTQEVFAQVKQIYKTPPIKDFGGFNFSQILPDPSKPSKRSFIEDLLFNKVTLADAGFIKQYGDCLGDIAARDLICAQKFNGLTVLPPLLTDEMIAQYTSALLAGTITCGWTFGAGACLQIPFAMQMAYRFNGIGVTQNVLYENQKLIANQFNSAIGKIQDSLSSTASALGKLQDVVNQNAQALNTLVKQLSSNFGAISSVLNDILSRLDKVEAEVQIDRLITGRLQSLQTYVTQQLIRAAEIRASANLAATKMSECVLGQSKRVDFCGKGYHLMSFPQSAPHGVVFLHVTYVPAQEKNFTTAPAICHDGKAHFPREGVFVSNGTHWFVTQRNFYEPQIITTDNTFVSGNCDVVIGIVNNTVYDPLQPELDSFKEELDKYFKNHTSPDVDLGDISGINASVVNIQKEIDRLNEVAKNLNESLIDLQELGKYEQGSGYIPEAPRDGQAYVRKDGEWVLLSTFLGRSLEVLFQGPGSLPETGGGSDYKDDDDKGGGGSGGGGSGGGGSGGGGSGGGGSHHHHHH

SEQ ID NO: 37 - protein, 1297 aa, Artificial Sequence
  source: /note="Description of Artificial Sequence: Synthetic polypeptide"
MFVFLVLLPLVSSQCVNLTTRTQLPPAYTNSFTRGVYYPDKVFRSSVLHSTQDLFLPFFSNVTWFHAIHVSGTNGTKRFDNPVLPFNDGVYFASTEKSNIIRGWIFGTTLDSKTQSLLIVNNATNVVIKVCEFQFCNDPFLGVYYHKNNKSWMESEFRVYSSANNCTFEYVSQPFLMDLEGKQGNFKNLREFVFKNIDGYFKIYSKHTPINLVRDLPQGFSALEPLVDLPIGINITRFQTLLALHRSYLTPGDSSSGWTAGAAAYYVGYLQPRTFLLKYNENGTITDAVDCALDPLSETKCTLKSFTVEKGIYQTSNFRVQPTESIVRFPNITNLCPFGEVFNATRFASVYAWNRKRISNCVADYSVLYNSASFSTFKCYGVSPTKLNDLCFTNVYADSFVIRGDEVRQIAPGQTGKIADYNYKLPDDFTGCVIAWNSNNLDSKVGGNYNYLYRLFRKSNLKPFERDISTEIYQAGSTPCNGVEGFNCYFPLQSYGFQPTNGVGYQPYRVVVLSFELLHAPATVCGPKKSTPLVKNKCVNFNFNGLTGTGVLTESNKKFLPFQQFGRDIADTTDAVRDPQTLEILDITPCSFGGVSVITPGTNTSNQVAVLYQDVNCTEVPVAIHADQLTPTWRVYSTGSNVFQTRAGCLIGAEHVNNSYECDIPIGAGICASYQTQTNSPSRAGSVASQSIIAYTMSLGAENSVAYSNNSIAIPTNFTISVTTEILPVSMTKTSVDCTMYICGDSTECSNLLLQYGSFCTQLNRALTGIAVEQDKNTQEVFAQVKQIYKTPPIKDFGGFNFSQILPDPSKPSKRSFIEDLLFNKVTLADAGFIKQYGDCLGDIAARDLICAQKFNGLTVLPPLLTDEMIAQYTSALLACTITSGWTCGAGAALQIPFAMQMAYRFNGIGVTQNVLYENQKLIANQFNSAIGKIQDSLSSTASALGKLQDVVNQNAQALNTLVKQLSSNFGAISSVLNDILSRLDKVEAEVQIDRLITGRLQSLQTYVTQQLIRAAEIRASANLAATKMSECVLGQSKRVDFCGKGYHLMSFPQSAPHGVVFLHVTYVPAQEKNFTTAPAICHDGKAHFPREGVFVSNGTHWFVTQRNFYEPQIITTDNTFVSGNCDVVIGIVNNTVYDPLQPELDSFKEELDKYFKNHTSPDVDLGDISGINASVVNIQKEIDRLNEVAKNLNESLIDLQELGKYEQGSGYIPEAPRDGQAYVRKDGEWVLLSTFLGRSLEVLFQGPGSLPETGGGSDYKDDDDKGGGGSGGGGSGGGGSGGGGSGGGGSHHHHHH

SEQ ID NO: 38 - protein, 1297 aa, Artificial Sequence
  source: /note="Description of Artificial Sequence: Synthetic polypeptide"
MFVFLVLLPLVSSQCVNLTTRTQLPPAYTNSFTRGVYYPDKVFRSSVLHSTQDLFLPFFSNVTWFHAIHVSGTNGTKRFDNPVLPFNDGVYFASTEKSNIIRGWIFGTTLDSKTQSLLIVNNATNVVIKVCEFQFCNDPFLGVYYHKNNKSWMESEFRVYSSANNCTFEYVSQPFLMDLEGKQGNFKNLREFVFKNIDGYFKIYSKHTPINLVRDLPQGFSALEPLVDLPIGINITRFQTLLALHRSYLTPGDSSSGWTAGAAAYYVGYLQPRTFLLKYNENGTITDAVDCALDPLSETKCTLKSFTVEKGIYQTSNFRVQPTESIVRFPNITNLCPFGEVFNATRFASVYAWNRKRISNCVADYSVLYNSASFSTFKCYGVSPTKLNDLCFTNVYADSFVIRGDEVRQIAPGQTGKIADYNYKLPDDFTGCVIAWNSNNLDSKVGGNYNYLYRLFRKSNLKPFERDISTEIYQAGSTPCNGVEGFNCYFPLQSYGFQPTNGVGYQPYRVVVLSFELLHAPATVCGPKKSTPLVKNKCVNFNFNGLTGTGVLTESNKKFLPFQQFGRDIADTTDAVRDPQTLEILDITPCSFGGVSVITPGTNTSNQVAVLYQDVNCTEVPVAIHADQLTPTWRVYSTGSNVFQTRAGCLIGAEHVNNSYECDIPIGAGICASYQTQTNSPSRAGSVASQSIIAYTMSLGAENSVAYSNNSIAIPTNFTISVTTEILPVSMTKTSVDCTMYICGDSTECSNLLLQYGSFCTQLNRALTGIAVEQDKNTQEVFAQVKQIYKTPPIKDFGGFNFSQILPDPSKPSKRSFIEDLLFNKVTLADAGFIKQYGDCLGDIAARDLICAQKFNGLTVLPPLLTDEMIAQYTSALLAGTITCGWTFGAGACLQIPFAMQMAYRFNGIGVTQNVLYENQKLIANQFNSAIGKIQDSLSSTASALGKLQDVVNQNAQALNTLVKQLSSNFGAISSVLNDILSRLDKVEAEVQIDRLITGRLQSLQTYVTQQLIRAAEIRASANLAATKMSECVLGQSKRVDFCGKGYHLMSFPQSAPHGVVFLHVTYVPAQEKNFTTAPAICHDGKAHFPREGVFVSNGTHWFVTQRNFYEPQIITTDNTFVSGNCDVVIGIVNNTVYDPLQPELDSFKEELDKYFKNHTSPDVDLGDISGINASVVNIQKEIDRLNEVAKNLNESLIDLQELGKYEQGSGYIPEAPRDGQAYVRKDGEWVLLSTFLGRSLEVLFQGPGSLPETGGGSDYKDDDDKGGGGSGGGGSGGGGSGGGGSGGGGSHHHHHH

SEQ ID NO: 39 - protein, 1297 aa, Artificial Sequence
  source: /note="Description of Artificial Sequence: Synthetic polypeptide"
MFVFLVLLPLVSSQCVNLTTRTQLPPAYTNSFTRGVYYPDKVFRSSVLHSTQDLFLPFFSNVTWFHAIHVSGTNGTKRFDNPVLPFNDGVYFASTEKSNIIRGWIFGTTLDSKTQSLLIVNNATNVVIKVCEFQFCNDPFLGVYYHKNNKSWMESEFRVYSSANNCTFEYVSQPFLMDLEGKQGNFKNLREFVFKNIDGYFKIYSKHTPINLVRDLPQGFSALEPLVDLPIGINITRFQTLLALHRSYLTPGDSSSGWTAGAAAYYVGYLQPRTFLLKYNENGTITDAVDCALDPLSETKCTLKSFTVEKGIYQTSNFRVQPTESIVRFPNITNLCPFGEVFNATRFASVYAWNRKRISNCVADYSVLYNSASFSTFKCYGVSPTKLNDLCFTNVYADSFVIRGDEVRQIAPGQTGKIADYNYKLPDDFTGCVIAWNSNNLDSKVGGNYNYLYRLFRKSNLKPFERDISTEIYQAGSTPCNGVEGFNCYFPLQSYGFQPTNGVGYQPYRVVVLSFELLHAPATVCGPKKSTNLVKNKCVNFNFNGLTGTGVLTESNKKFLPFQQFGRDIADTTDAVRDPQTLEILDITPCSFGGVSVITPGTNTSNQVAVLYQNVNCTEVPVAIHADQLTPTWRVYSTGSNVFQTRAGCLIGAEHVNNSYECDIPIGAGICASYQTQTNSPSRAGSVASQSIIAYTMSLGAENSVAYSNNSIAIPTNFTISVTTEILPVSMTKTSVDCTMYICGDSTECSNLLLQYGSFCTQLNRALTGIAVEQDKNTQEVFAQVKQIYKTPPIKDFGGFNFSQILPDPSKPSKRSFIEDLLFNKVTLADAGFIKQYGDCLGDIAARDLICAQKFNGLTVLPPLLTDEMIAQYTSALLAGTITSGWTFGAGPALQIPFAMQMAYRFNGIGVTQNVLYENQKLIANQFNSAIGKIQDSLSSTPSALGKLQDVVNQNAQALNTLVKQLSSNFGAISSVLNDILSRLDKVEAEVQIDRLITGRLQSLQTYVTQQLIRAAEIRASANLAATKMSECVLGQSKRVDFCGKGYHLMSFPQSAPHGVVFLHVTYVPAQEKNFTTAPAICHDGKAHFPREGVFVSNGTHWFVTQRNFYEPQIITTDNTFVSGNCDVVIGIVNNTVYDPLQPELDSFKEELDKYFKNHTSPDVDLGDISGINASVVNIQKEIDRLNEVAKNLNESLIDLQELGKYEQGSGYIPEAPRDGQAYVRKDGEWVLLSTFLGRSLEVLFQGPGSLPETGGGSDYKDDDDKGGGGSGGGGSGGGGSGGGGSGGGGSHHHHHH

SEQ ID NO: 40 - protein, 1297 aa, Artificial Sequence
  source: /note="Description of Artificial Sequence: Synthetic polypeptide"
MFVFLVLLPLVSSQCVNLTTRTQLPPAYTNSFTRGVYYPDKVFRSSVLHSTQDLFLPFFSNVTWFHAIHVSGTNGTKRFDNPVLPFNDGVYFASTEKSNIIRGWIFGTTLDSKTQSLLIVNNATNVVIKVCEFQFCNDPFLGVYYHKNNKSWMESEFRVYSSANNCTFEYVSQPFLMDLEGKQGNFKNLREFVFKNIDGYFKIYSKHTPINLVRDLPQGFSALEPLVDLPIGINITRFQTLLALHRSYLTPGDSSSGWTAGAAAYYVGYLQPRTFLLKYNENGTITDAVDCALDPLSETKCTLKSFTVEKGIYQTSNFRVQPTESIVRFPNITNLCPFGEVFNATRFASVYAWNRKRISNCVADYSVLYNSASFSTFKCYGVSPTKLNDLCFTNVYADSFVIRGDEVRQIAPGQTGKIADYNYKLPDDFTGCVIAWNSNNLDSKVGGNYNYLYRLFRKSNLKPFERDISTEIYQAGSTPCNGVEGFNCYFPLQSYGFQPTNGVGYQPYRVVVLSFELLHAPATVCGPKKSTNLVKNKCVNFNFNGLTGTGVLTESNKKFLPFQQFGRDIADITDAVRDPQTLEILDITPCSFGGVSVITPGTNTSNQVAVLYQDVNCTEVPVAIHADQLTPTWRVYSTGSNVFQTRAGCLIGAEHVNNSYECDIPIGAGICASYQTQTNSPSRAGSVASQSIIAYTMSLGAENSVAYSNNSIAIPTNFTISVTTEILPVSMTKTSVDCTMYICGDSTECSNLLLQYGSFCTQLNRALTGIAVEQDKNTQEVFAQVKQIYKTPPIKDFGGFNFSQILPDPSKPSKRSFIEDLLFNKVTLADAGFIKQYGDCLGDIAARDLICAQKFNGLTVLPPLLTDEMIAQYTSALLAGTITSGWTFGAGPALQIPFAMQMAYRFNGIGVTQNVLYENQKLIANQFNSAIGKIQDSLSSTPSALGKLQDVVNQNAQALNTLVKQLSSNFGAISSVLNDILSRLDKVEAEVQIDRLITGRLQSLQTYVTQQLIRAAEIRASANLAATKMSECVLGQSKRVDFCGKGYHLMSFPQSAPHGVVFLHVTYVPAQEKNFTTAPAICHDGKAHFPREGVFVSNGTHWFVTQRNFYEPQIITTDNTFVSGNCDVVIGIVNNTVYDPLQPELDSFKEELDKYFKNHTSPDVDLGDISGINASVVNIQKEIDRLNEVAKNLNESLIDLQELGKYEQGSGYIPEAPRDGQAYVRKDGEWVLLSTFLGRSLEVLFQGPGSLPETGGGSDYKDDDDKGGGGSGGGGSGGGGSGGGGSGGGGSHHHHHH

SEQ ID NO: 41 - protein, 1297 aa, Artificial Sequence
  source: /note="Description of Artificial Sequence: Synthetic polypeptide"
MFVFLVLLPLVSSQCVNLTTRTQLPPAYTNSFTRGVYYPDKVFRSSVLHSTQDLFLPFFSNVTWFHAIHVSGTNGTKRFDNPVLPFNDGVYFASTEKSNIIRGWIFGTTLDSKTQSLLIVNNATNVVIKVCEFQFCNDPFLGVYYHKNNKSWMESEFRVYSSANNCTFEYVSQPFLMDLEGKQGNFKNLREFVFKNIDGYFKIYSKHTPINLVRDLPQGFSALEPLVDLPIGINITRFQTLLALHRSYLTPGDSSSGWTAGAAAYYVGYLQPRTFLLKYNENGTITDAVDCALDPLSETKCTLKSFTVEKGIYQTSNFRVQPTESIVRFPNITNLCPFGEVFNATRFASVYAWNRKRISNCVADYSVLYNSASFSTFKCYGVSPTKLNDLCFTNVYADSFVIRGDEVRQIAPGQTGKIADYNYKLPDDFTGCVIAWNSNNLDSKVGGNYNYLYRLFRKSNLKPFERDISTEIYQAGSTPCNGVEGFNCYFPLQSYGFQPTNGVGYQPYRVVVLSFELLHAPATVCGPKKSTPLVKNKCVNFNFNGLTGTGVLTESNKKFLPFQQFGRDIADTTDAVRDPQTLEILDITPCSFGGVSVITPGTNTSNQVAVLYQDVNCTEVPVAIHADQLTPTWRVYSTGSNVFQTRAGCLIGAEHVNNSYECDIPIGAGICASYQTQTNSPSRAGSVASQSIIAYTMSLGAENSVAYSNNSIAIPTNFTISVTTEILPVSMTKTSVDCTMYICGDSTECSNLLLQYGSFCTQLNRALTGIAVEQDKNTQEVFAQVKQIYKTPPIKDFGGFNFSQILPDPSKPSKRSFIEDLLFNKVTLADAGFIKQYGDCLGDIAARDLICAQKFNGLTVLPPLLTDEMIAQYTSALLAGTITSGWTFGAGPALQIPFAMQMAYRFNGIGVTQNVLYENQKLIANQFNSAIGKIQDSLSSTPSALGKLQDVVNQNAQALNTLVKQLSSNFGAISSVLNDILSRLDKVEAEVQIDRLITGRLQSLQTYVTQQLIRAAEIRASANLAATKMSECVLGQSKRVDFCGKGYHLMSFPQSAPHGVVFLHVTYVPAQEKNFTTAPAICHDGKAHFPREGVFVSNGTHWFVTQRNFYEPQIITTDNTFVSGNCDVVIGIVNNTVYDPLQPELDSFKEELDKYFKNHTSPDVDLGDISGINASVVNIQKEIDRLNEVAKNLNESLIDLQELGKYEQGSGYIPEAPRDGQAYVRKDGEWVLLSTFLGRSLEVLFQGPGSLPETGGGSDYKDDDDKGGGGSGGGGSGGGGSGGGGSGGGGSHHHHHH

SEQ ID NO: 42 - protein, 1297 aa, Artificial Sequence
  source: /note="Description of Artificial Sequence: Synthetic polypeptide"
MFVFLVLLPLVSSQCVNLTTRTQLPPAYTNSFTRGVYYPDKVFRSSVLHSTQDLFLPFFSNVTWFHAIHVSGTNGTKRFDNPVLPFNDGVYFASTEKSNIIRGWIFGTTLDSKTQSLLIVNNATNVVIKVCEFQFCNDPFLGVYYHKNNKSWMESEFRVYSSANNCTFEYVSQPFLMDLEGKQGNFKNLREFVFKNIDGYFKIYSKHTPINLVRDLPQGFSALEPLVDLPIGINITRFQTLLALHRSYLTPGDSSSGWTAGAAAYYVGYLQPRTFLLKYNENGTITDAVDCALDPLSETKCTLKSFTVEKGIYQTSNFRVQPTESIVRFPNITNLCPFGEVFNATRFASVYAWNRKRISNCVADYSVLYNSASFSTFKCYGVSPTKLNDLCFTNVYADSFVIRGDEVRQIAPGQTGKIADYNYKLPDDFTGCVIAWNSNNLDSKVGGNYNYLYRLFRKSNLKPFERDISTEIYQAGSTPCNGVEGFNCYFPLQSYGFQPTNGVGYQPYRVVVLSFELLHAPATVCGPKKSTNLVKNKCVNFNFNGLTGTGVLTESNKKFLPFQQFGRDIADTTDAVRDPQTLEILDITPCSFGGVSVITPGTNTSNQVAVLYQDVNCTEVPVAIHADQLTPTWRVYSTGSNVFQTRAGCLIGAEHVNNSYECDIPIGAGICASYQTQTNSPSRAGSVASQSIIAYTMSLGAENSVAYSNNSIAIPTNFTISVTTEILPVSMTKTSVDCTMYICGDSTECSNLLLQYGSFCTQLNRALTGIAVEQDKNTQEVFAQVKQIYKTPPIKDFGGFNFSQILPDPSKPSKRSFIEDLLFNKVTLADAGFIKQYGDCLGDIAARDLICAQKFNGLTVLPPLLTDEMIAQYTSALLACTITSGWTCGAGPALQIPFAMQMAYRFNGIGVTQNVLYENQKLIANQFNSAIGKIQDSLSSTPSALGKLQDVVNQNAQALNTLVKQLSSNFGAISSVLNDILSRLDKVEAEVQIDRLITGRLQSLQTYVTQQLIRAAEIRASANLAATKMSECVLGQSKRVDFCGKGYHLMSFPQSAPHGVVFLHVTYVPAQEKNFTTAPAICHDGKAHFPREGVFVSNGTHWFVTQRNFYEPQIITTDNTFVSGNCDVVIGIVNNTVYDPLQPELDSFKEELDKYFKNHTSPDVDLGDISGINASVVNIQKEIDRLNEVAKNLNESLIDLQELGKYEQGSGYIPEAPRDGQAYVRKDGEWVLLSTFLGRSLEVLFQGPGSLPETGGGSDYKDDDDKGGGGSGGGGSGGGGSGGGGSGGGGSHHHHHH

SEQ ID NO: 43 - protein, 1297 aa, Artificial Sequence
  source: /note="Description of Artificial Sequence: Synthetic polypeptide"
MFVFLVLLPLVSSQCVNLTTRTQLPPAYTNSFTRGVYYPDKVFRSSVLHSTQDLFLPFFSNVTWFHAIHVSGTNGTKRFDNPVLPFNDGVYFASTEKSNIIRGWIFGTTLDSKTQSLLIVNNATNVVIKVCEFQFCNDPFLGVYYHKNNKSWMESEFRVYSSANNCTFEYVSQPFLMDLEGKQGNFKNLREFVFKNIDGYFKIYSKHTPINLVRDLPQGFSALEPLVDLPIGINITRFQTLLALHRSYLTPGDSSSGWTAGAAAYYVGYLQPRTFLLKYNENGTITDAVDCALDPLSETKCTLKSFTVEKGIYQTSNFRVQPTESIVRFPNITNLCPFGEVFNATRFASVYAWNRKRISNCVADYSVLYNSASFSTFKCYGVSPTKLNDLCFTNVYADSFVIRGDEVRQIAPGQTGKIADYNYKLPDDFTGCVIAWNSNNLDSKVGGNYNYLYRLFRKSNLKPFERDISTEIYQAGSTPCNGVEGFNCYFPLQSYGFQPTNGVGYQPYRVVVLSFELLHAPATVCGPKKSTNLVKNKCVNFNFNGLTGTGVLTESNKKFLPFQQFGRDIADTTDAVRDPQTLEILDITPCSFGGVSVITPGTNTSNQVAVLYQDVNCTEVPVAIHADQLTPTWRVYSTGSNVFQTRAGCLIGAEHVNNSYECDIPIGAGICASYQTQTNSPSRAGSVASQSIIAYTMSLGAENSVAYSNNSIAIPTNFTISVTTEILPVSMTKTSVDCTMYICGDSTECSNLLLQYGSFCTQLNRALTGIAVEQDKNTQEVFAQVKQIYKTPPIKDFGGFNFSQILPDPSKPSKRSFIEDLLFNKVTLADAGFIKQYGDCLGDIAARDLICAQKFNGLTVLPPLLTDEMIAQYTSALLAGTITCGWTFGAGPCLQIPFAMQMAYRFNGIGVTQNVLYENQKLIANQFNSAIGKIQDSLSSTPSALGKLQDVVNQNAQALNTLVKQLSSNFGAISSVLNDILSRLDKVEAEVQIDRLITGRLQSLQTYVTQQLIRAAEIRASANLAATKMSECVLGQSKRVDFCGKGYHLMSFPQSAPHGVVFLHVTYVPAQEKNFTTAPAICHDGKAHFPREGVFVSNGTHWFVTQRNFYEPQIITTDNTFVSGNCDVVIGIVNNTVYDPLQPELDSFKEELDKYFKNHTSPDVDLGDISGINASVVNIQKEIDRLNEVAKNLNESLIDLQELGKYEQGSGYIPEAPRDGQAYVRKDGEWVLLSTFLGRSLEVLFQGPGSLPETGGGSDYKDDDDKGGGGSGGGGSGGGGSGGGGSGGGGSHHHHHH

SEQ ID NO: 44 - protein, 1297 aa, Artificial Sequence
  source: /note="Description of Artificial Sequence: Synthetic polypeptide"
MFVFLVLLPLVSSQCVNLTTRTQLPPAYTNSFTRGVYYPDKVFRSSVLHSTQDLFLPFFSNVTWFHAIHVSGTNGTKRFDNPVLPFNDGVYFASTEKSNIIRGWIFGTTLDSKTQSLLIVNNATNVVIKVCEFQFCNDPFLGVYYHKNNKSWMESEFRVYSSANNCTFEYVSQPFLMDLEGKQGNFKNLREFVFKNIDGYFKIYSKHTPINLVRDLPQGFSALEPLVDLPIGINITRFQTLLALHRSYLTPGDSSSGWTAGAAAYYVGYLQPRTFLLKYNENGTITDAVDCALDPLSETKCTLKSFTVEKGIYQTSNFRVQPTESIVRFPNITNLCPFGEVFNATRFASVYAWNRKRISNCVADYSVLYNSASFSTFKCYGVSPTKLNDLCFTNVYADSFVIRGDEVRQIAPGQTGKIADYNYKLPDDFTGCVIAWNSNNLDSKVGGNYNYLYRLFRKSNLKPFERDISTEIYQAGSTPCNGVEGFNCYFPLQSYGFQPTNGVGYQPYRVVVLSFELLHAPATVCGPKKSTNLVKNKCVNFNFNGLTGTGVLTESNKKFLPFQQFGRDIADITDAVRDPQTLEILDITPCSFGGVSVITPGTNTSNQVAVLYQNVNCTEVPVAIHADQLTPTWRVYSTGSNVFQTRAGCLIGAEHVNNSYECDIPIGAGICASYQTQTNSPSRAGSVASQSIIAYTMSLGAENSVAYSNNSIAIPTNFTISVTTEILPVSMTKTSVDCTMYICGDSTECSNLLLQYGSFCTQLNRALTGIAVEQDKNTQEVFAQVKQIYKTPPIKDFGGFNFSQILPDPSKPSKRSFIEDLLFNKVTLADAGFIKQYGDCLGDIAARDLICAQKFNGLTVLPPLLTDEMIAQYTSALLAGTITSGWTFGAGAALQIPFAMQMAYRFNGIGVTQNVLYENQKLIANQFNSAIGKIQDSLSSTPSALGKLQDVVNQNAQALNTLVKQLSSNFGAISSVLNDILSRLDKVEAEVQIDRLITGRLQSLQTYVTQQLIRAAEIRASANLAATKMSECVLGQSKRVDFCGKGYHLMSFPQSAPHGVVFLHVTYVPAQEKNFTTAPAICHDGKAHFPREGVFVSNGTHWFVTQRNFYEPQIITTDNTFVSGNCDVVIGIVNNTVYDPLQPELDSFKEELDKYFKNHTSPDVDLGDISGINASVVNIQKEIDRLNEVAKNLNESLIDLQELGKYEQGSGYIPEAPRDGQAYVRKDGEWVLLSTFLGRSLEVLFQGPGSLPETGGGSDYKDDDDKGGGGSGGGGSGGGGSGGGGSGGGGSHHHHHH

SEQ ID NO: 45 - protein, 1297 aa, Artificial Sequence
  source: /note="Description of Artificial Sequence: Synthetic polypeptide"
MFVFLVLLPLVSSQCVNLTTRTQLPPAYTNSFTRGVYYPDKVFRSSVLHSTQDLFLPFFSNVTWFHAIHVSGTNGTKRFDNPVLPFNDGVYFASTEKSNIIRGWIFGTTLDSKTQSLLIVNNATNVVIKVCEFQFCNDPFLGVYYHKNNKSWMESEFRVYSSANNCTFEYVSQPFLMDLEGKQGNFKNLREFVFKNIDGYFKIYSKHTPINLVRDLPQGFSALEPLVDLPIGINITRFQTLLALHRSYLTPGDSSSGWTAGAAAYYVGYLQPRTFLLKYNENGTITDAVDCALDPLSETKCTLKSFTVEKGIYQTSNFRVQPTESIVRFPNITNLCPFGEVFNATRFASVYAWNRKRISNCVADYSVLYNSASFSTFKCYGVSPTKLNDLCFTNVYADSFVIRGDEVRQIAPGQTGKIADYNYKLPDDFTGCVIAWNSNNLDSKVGGNYNYLYRLFRKSNLKPFERDISTEIYQAGSTPCNGVEGFNCYFPLQSYGFQPTNGVGYQPYRVVVLSFELLHAPATVCGPKKSTPLVKNKCVNFNFNGLTGTGVLTESNKKFLPFQQFGRDIADTTDAVRDPQTLEILDITPCSFGGVSVITPGTNTSNQVAVLYQNVNCTEVPVAIHADQLTPTWRVYSTGSNVFQTRAGCLIGAEHVNNSYECDIPIGAGICASYQTQTNSPSRAGSVASQSIIAYTMSLGAENSVAYSNNSIAIPTNFTISVTTEILPVSMTKTSVDCTMYICGDSTECSNLLLQYGSFCTQLNRALTGIAVEQDKNTQEVFAQVKQIYKTPPIKDFGGFNFSQILPDPSKPSKRSFIEDLLFNKVTLADAGFIKQYGDCLGDIAARDLICAQKFNGLTVLPPLLTDEMIAQYTSALLAGTITSGWTFGAGAALQIPFAMQMAYRFNGIGVTQNVLYENQKLIANQFNSAIGKIQDSLSSTPSALGKLQDVVNQNAQALNTLVKQLSSNFGAISSVLNDILSRLDKVEAEVQIDRLITGRLQSLQTYVTQQLIRAAEIRASANLAATKMSECVLGQSKRVDFCGKGYHLMSFPQSAPHGVVFLHVTYVPAQEKNFTTAPAICHDGKAHFPREGVFVSNGTHWFVTQRNFYEPQIITTDNTFVSGNCDVVIGIVNNTVYDPLQPELDSFKEELDKYFKNHTSPDVDLGDISGINASVVNIQKEIDRLNEVAKNLNESLIDLQELGKYEQGSGYIPEAPRDGQAYVRKDGEWVLLSTFLGRSLEVLFQGPGSLPETGGGSDYKDDDDKGGGGSGGGGSGGGGSGGGGSGGGGSHHHHHH

SEQ ID NO: 46 - protein, 1297 aa, Artificial Sequence
  source: /note="Description of Artificial Sequence: Synthetic polypeptide"
MFVFLVLLPLVSSQCVNLTTRTQLPPAYTNSFTRGVYYPDKVFRSSVLHSTQDLFLPFFSNVTWFHAIHVSGTNGTKRFDNPVLPFNDGVYFASTEKSNIIRGWIFGTTLDSKTQSLLIVNNATNVVIKVCEFQFCNDPFLGVYYHKNNKSWMESEFRVYSSANNCTFEYVSQPFLMDLEGKQGNFKNLREFVFKNIDGYFKIYSKHTPINLVRDLPQGFSALEPLVDLPIGINITRFQTLLALHRSYLTPGDSSSGWTAGAAAYYVGYLQPRTFLLKYNENGTITDAVDCALDPLSETKCTLKSFTVEKGIYQTSNFRVQPTESIVRFPNITNLCPFGEVFNATRFASVYAWNRKRISNCVADYSVLYNSASFSTFKCYGVSPTKLNDLCFTNVYADSFVIRGDEVRQIAPGQTGKIADYNYKLPDDFTGCVIAWNSNNLDSKVGGNYNYLYRLFRKSNLKPFERDISTEIYQAGSTPCNGVEGFNCYFPLQSYGFQPTNGVGYQPYRVVVLSFELLHAPATVCGPKKSTNLVKNKCVNFNFNGLTGTGVLTESNKKFLPFQQFGRDIADTTDAVRDPQTLEILDITPCSFGGVSVITPGTNTSNQVAVLYQNVNCTEVPVAIHADQLTPTWRVYSTGSNVFQTRAGCLIGAEHVNNSYECDIPIGAGICASYQTQTNSPSRAGSVASQSIIAYTMSLGAENSVAYSNNSIAIPTNFTISVTTEILPVSMTKTSVDCTMYICGDSTECSNLLLQYGSFCTQLNRALTGIAVEQDKNTQEVFAQVKQIYKTPPIKDFGGFNFSQILPDPSKPSKRSFIEDLLFNKVTLADAGFIKQYGDCLGDIAARDLICAQKFNGLTVLPPLLTDEMIAQYTSALLACTITSGWTCGAGAALQIPFAMQMAYRFNGIGVTQNVLYENQKLIANQFNSAIGKIQDSLSSTPSALGKLQDVVNQNAQALNTLVKQLSSNFGAISSVLNDILSRLDKVEAEVQIDRLITGRLQSLQTYVTQQLIRAAEIRASANLAATKMSECVLGQSKRVDFCGKGYHLMSFPQSAPHGVVFLHVTYVPAQEKNFTTAPAICHDGKAHFPREGVFVSNGTHWFVTQRNFYEPQIITTDNTFVSGNCDVVIGIVNNTVYDPLQPELDSFKEELDKYFKNHTSPDVDLGDISGINASVVNIQKEIDRLNEVAKNLNESLIDLQELGKYEQGSGYIPEAPRDGQAYVRKDGEWVLLSTFLGRSLEVLFQGPGSLPETGGGSDYKDDDDKGGGGSGGGGSGGGGSGGGGSGGGGSHHHHHH

SEQ ID NO: 47 - protein, 1297 aa, Artificial Sequence
  source: /note="Description of Artificial Sequence: Synthetic polypeptide"
MFVFLVLLPLVSSQCVNLTTRTQLPPAYTNSFTRGVYYPDKVFRSSVLHSTQDLFLPFFSNVTWFHAIHVSGTNGTKRFDNPVLPFNDGVYFASTEKSNIIRGWIFGTTLDSKTQSLLIVNNATNVVIKVCEFQFCNDPFLGVYYHKNNKSWMESEFRVYSSANNCTFEYVSQPFLMDLEGKQGNFKNLREFVFKNIDGYFKIYSKHTPINLVRDLPQGFSALEPLVDLPIGINITRFQTLLALHRSYLTPGDSSSGWTAGAAAYYVGYLQPRTFLLKYNENGTITDAVDCALDPLSETKCTLKSFTVEKGIYQTSNFRVQPTESIVRFPNITNLCPFGEVFNATRFASVYAWNRKRISNCVADYSVLYNSASFSTFKCYGVSPTKLNDLCFTNVYADSFVIRGDEVRQIAPGQTGKIADYNYKLPDDFTGCVIAWNSNNLDSKVGGNYNYLYRLFRKSNLKPFERDISTEIYQAGSTPCNGVEGFNCYFPLQSYGFQPTNGVGYQPYRVVVLSFELLHAPATVCGPKKSTNLVKNKCVNFNFNGLTGTGVLTESNKKFLPFQQFGRDIADTTDAVRDPQTLEILDITPCSFGGVSVITPGTNTSNQVAVLYQNVNCTEVPVAIHADQLTPTWRVYSTGSNVFQTRAGCLIGAEHVNNSYECDIPIGAGICASYQTQTNSPSRAGSVASQSIIAYTMSLGAENSVAYSNNSIAIPTNFTISVTTEILPVSMTKTSVDCTMYICGDSTECSNLLLQYGSFCTQLNRALTGIAVEQDKNTQEVFAQVKQIYKTPPIKDFGGFNFSQILPDPSKPSKRSFIEDLLFNKVTLADAGFIKQYGDCLGDIAARDLICAQKFNGLTVLPPLLTDEMIAQYTSALLAGTITCGWTFGAGACLQIPFAMQMAYRFNGIGVTQNVLYENQKLIANQFNSAIGKIQDSLSSTPSALGKLQDVVNQNAQALNTLVKQLSSNFGAISSVLNDILSRLDKVEAEVQIDRLITGRLQSLQTYVTQQLIRAAEIRASANLAATKMSECVLGQSKRVDFCGKGYHLMSFPQSAPHGVVFLHVTYVPAQEKNFTTAPAICHDGKAHFPREGVFVSNGTHWFVTQRNFYEPQIITTDNTFVSGNCDVVIGIVNNTVYDPLQPELDSFKEELDKYFKNHTSPDVDLGDISGINASVVNIQKEIDRLNEVAKNLNESLIDLQELGKYEQGSGYIPEAPRDGQAYVRKDGEWVLLSTFLGRSLEVLFQGPGSLPETGGGSDYKDDDDKGGGGSGGGGSGGGGSGGGGSGGGGSHHHHHH

SEQ ID NO: 48 - protein, 1297 aa, Artificial Sequence
  source: /note="Description of Artificial Sequence: Synthetic polypeptide"
MFVFLVLLPLVSSQCVNLTTRTQLPPAYTNSFTRGVYYPDKVFRSSVLHSTQDLFLPFFSNVTWFHAIHVSGTNGTKRFDNPVLPFNDGVYFASTEKSNIIRGWIFGTTLDSKTQSLLIVNNATNVVIKVCEFQFCNDPFLGVYYHKNNKSWMESEFRVYSSANNCTFEYVSQPFLMDLEGKQGNFKNLREFVFKNIDGYFKIYSKHTPINLVRDLPQGFSALEPLVDLPIGINITRFQTLLALHRSYLTPGDSSSGWTAGAAAYYVGYLQPRTFLLKYNENGTITDAVDCALDPLSETKCTLKSFTVEKGIYQTSNFRVQPTESIVRFPNITNLCPFGEVFNATRFASVYAWNRKRISNCVADYSVLYNSASFSTFKCYGVSPTKLNDLCFTNVYADSFVIRGDEVRQIAPGQTGKIADYNYKLPDDFTGCVIAWNSNNLDSKVGGNYNYLYRLFRKSNLKPFERDISTEIYQAGSTPCNGVEGFNCYFPLQSYGFQPTNGVGYQPYRVVVLSFELLHAPATVCGPKKSTPLVKNKCVNFNFNGLTGTGVLTESNKKFLPFQQFGRDIADITDAVRDPQTLEILDITPCSFGGVSVITPGTNTSNQVAVLYQDVNCTEVPVAIHADQLTPTWRVYSTGSNVFQTRAGCLIGAEHVNNSYECDIPIGAGICASYQTQTNSPSRAGSVASQSIIAYTMSLGAENSVAYSNNSIAIPTNFTISVTTEILPVSMTKTSVDCTMYICGDSTECSNLLLQYGSFCTQLNRALTGIAVEQDKNTQEVFAQVKQIYKTPPIKDFGGFNFSQILPDPSKPSKRSFIEDLLFNKVTLADAGFIKQYGDCLGDIAARDLICAQKFNGLTVLPPLLTDEMIAQYTSALLAGTITSGWTFGAGAALQIPFAMQMAYRFNGIGVTQNVLYENQKLIANQFNSAIGKIQDSLSSTPSALGKLQDVVNQNAQALNTLVKQLSSNFGAISSVLNDILSRLDKVEAEVQIDRLITGRLQSLQTYVTQQLIRAAEIRASANLAATKMSECVLGQSKRVDFCGKGYHLMSFPQSAPHGVVFLHVTYVPAQEKNFTTAPAICHDGKAHFPREGVFVSNGTHWFVTQRNFYEPQIITTDNTFVSGNCDVVIGIVNNTVYDPLQPELDSFKEELDKYFKNHTSPDVDLGDISGINASVVNIQKEIDRLNEVAKNLNESLIDLQELGKYEQGSGYIPEAPRDGQAYVRKDGEWVLLSTFLGRSLEVLFQGPGSLPETGGGSDYKDDDDKGGGGSGGGGSGGGGSGGGGSGGGGSHHHHHH

SEQ ID NO: 49 - protein, 1297 aa, Artificial Sequence
  source: /note="Description of Artificial Sequence: Synthetic polypeptide"
MFVFLVLLPLVSSQCVNLTTRTQLPPAYTNSFTRGVYYPDKVFRSSVLHSTQDLFLPFFSNVTWFHAIHVSGTNGTKRFDNPVLPFNDGVYFASTEKSNIIRGWIFGTTLDSKTQSLLIVNNATNVVIKVCEFQFCNDPFLGVYYHKNNKSWMESEFRVYSSANNCTFEYVSQPFLMDLEGKQGNFKNLREFVFKNIDGYFKIYSKHTPINLVRDLPQGFSALEPLVDLPIGINITRFQTLLALHRSYLTPGDSSSGWTAGAAAYYVGYLQPRTFLLKYNENGTITDAVDCALDPLSETKCTLKSFTVEKGIYQTSNFRVQPTESIVRFPNITNLCPFGEVFNATRFASVYAWNRKRISNCVADYSVLYNSASFSTFKCYGVSPTKLNDLCFTNVYADSFVIRGDEVRQIAPGQTGKIADYNYKLPDDFTGCVIAWNSNNLDSKVGGNYNYLYRLFRKSNLKPFERDISTEIYQAGSTPCNGVEGFNCYFPLQSYGFQPTNGVGYQPYRVVVLSFELLHAPATVCGPKKSTNLVKNKCVNFNFNGLTGTGVLTESNKKFLPFQQFGRDIADITDAVRDPQTLEILDITPCSFGGVSVITPGTNTSNQVAVLYQDVNCTEVPVAIHADQLTPTWRVYSTGSNVFQTRAGCLIGAEHVNNSYECDIPIGAGICASYQTQTNSPSRAGSVASQSIIAYTMSLGAENSVAYSNNSIAIPTNFTISVTTEILPVSMTKTSVDCTMYICGDSTECSNLLLQYGSFCTQLNRALTGIAVEQDKNTQEVFAQVKQIYKTPPIKDFGGFNFSQILPDPSKPSKRSFIEDLLFNKVTLADAGFIKQYGDCLGDIAARDLICAQKFNGLTVLPPLLTDEMIAQYTSALLACTITSGWTCGAGAALQIPFAMQMAYRFNGIGVTQNVLYENQKLIANQFNSAIGKIQDSLSSTPSALGKLQDVVNQNAQALNTLVKQLSSNFGAISSVLNDILSRLDKVEAEVQIDRLITGRLQSLQTYVTQQLIRAAEIRASANLAATKMSECVLGQSKRVDFCGKGYHLMSFPQSAPHGVVFLHVTYVPAQEKNFTTAPAICHDGKAHFPREGVFVSNGTHWFVTQRNFYEPQIITTDNTFVSGNCDVVIGIVNNTVYDPLQPELDSFKEELDKYFKNHTSPDVDLGDISGINASVVNIQKEIDRLNEVAKNLNESLIDLQELGKYEQGSGYIPEAPRDGQAYVRKDGEWVLLSTFLGRSLEVLFQGPGSLPETGGGSDYKDDDDKGGGGSGGGGSGGGGSGGGGSGGGGSHHHHHH

SEQ ID NO: 50 - protein, 1297 aa, Artificial Sequence
  source: /note="Description of Artificial Sequence: Synthetic polypeptide"
MFVFLVLLPLVSSQCVNLTTRTQLPPAYTNSFTRGVYYPDKVFRSSVLHSTQDLFLPFFSNVTWFHAIHVSGTNGTKRFDNPVLPFNDGVYFASTEKSNIIRGWIFGTTLDSKTQSLLIVNNATNVVIKVCEFQFCNDPFLGVYYHKNNKSWMESEFRVYSSANNCTFEYVSQPFLMDLEGKQGNFKNLREFVFKNIDGYFKIYSKHTPINLVRDLPQGFSALEPLVDLPIGINITRFQTLLALHRSYLTPGDSSSGWTAGAAAYYVGYLQPRTFLLKYNENGTITDAVDCALDPLSETKCTLKSFTVEKGIYQTSNFRVQPTESIVRFPNITNLCPFGEVFNATRFASVYAWNRKRISNCVADYSVLYNSASFSTFKCYGVSPTKLNDLCFTNVYADSFVIRGDEVRQIAPGQTGKIADYNYKLPDDFTGCVIAWNSNNLDSKVGGNYNYLYRLFRKSNLKPFERDISTEIYQAGSTPCNGVEGFNCYFPLQSYGFQPTNGVGYQPYRVVVLSFELLHAPATVCGPKKSTNLVKNKCVNFNFNGLTGTGVLTESNKKFLPFQQFGRDIADITDAVRDPQTLEILDITPCSFGGVSVITPGTNTSNQVAVLYQDVNCTEVPVAIHADQLTPTWRVYSTGSNVFQTRAGCLIGAEHVNNSYECDIPIGAGICASYQTQTNSPSRAGSVASQSIIAYTMSLGAENSVAYSNNSIAIPTNFTISVTTEILPVSMTKTSVDCTMYICGDSTECSNLLLQYGSFCTQLNRALTGIAVEQDKNTQEVFAQVKQIYKTPPIKDFGGFNFSQILPDPSKPSKRSFIEDLLFNKVTLADAGFIKQYGDCLGDIAARDLICAQKFNGLTVLPPLLTDEMIAQYTSALLAGTITCGWTFGAGACLQIPFAMQMAYRFNGIGVTQNVLYENQKLIANQFNSAIGKIQDSLSSTPSALGKLQDVVNQNAQALNTLVKQLSSNFGAISSVLNDILSRLDKVEAEVQIDRLITGRLQSLQTYVTQQLIRAAEIRASANLAATKMSECVLGQSKRVDFCGKGYHLMSFPQSAPHGVVFLHVTYVPAQEKNFTTAPAICHDGKAHFPREGVFVSNGTHWFVTQRNFYEPQIITTDNTFVSGNCDVVIGIVNNTVYDPLQPELDSFKEELDKYFKNHTSPDVDLGDISGINASVVNIQKEIDRLNEVAKNLNESLIDLQELGKYEQGSGYIPEAPRDGQAYVRKDGEWVLLSTFLGRSLEVLFQGPGSLPETGGGSDYKDDDDKGGGGSGGGGSGGGGSGGGGSGGGGSHHHHHH

SEQ ID NO: 51 - protein, 1297 aa, Artificial Sequence
  source: /note="Description of Artificial Sequence: Synthetic polypeptide"
MFVFLVLLPLVSSQCVNLTTRTQLPPAYTNSFTRGVYYPDKVFRSSVLHSTQDLFLPFFSNVTWFHAIHVSGTNGTKRFDNPVLPFNDGVYFASTEKSNIIRGWIFGTTLDSKTQSLLIVNNATNVVIKVCEFQFCNDPFLGVYYHKNNKSWMESEFRVYSSANNCTFEYVSQPFLMDLEGKQGNFKNLREFVFKNIDGYFKIYSKHTPINLVRDLPQGFSALEPLVDLPIGINITRFQTLLALHRSYLTPGDSSSGWTAGAAAYYVGYLQPRTFLLKYNENGTITDAVDCALDPLSETKCTLKSFTVEKGIYQTSNFRVQPTESIVRFPNITNLCPFGEVFNATRFASVYAWNRKRISNCVADYSVLYNSASFSTFKCYGVSPTKLNDLCFTNVYADSFVIRGDEVRQIAPGQTGKIADYNYKLPDDFTGCVIAWNSNNLDSKVGGNYNYLYRLFRKSNLKPFERDISTEIYQAGSTPCNGVEGFNCYFPLQSYGFQPTNGVGYQPYRVVVLSFELLHAPATVCGPKKSTPLVKNKCVNFNFNGLTGTGVLTESNKKFLPFQQFGRDIADTTDAVRDPQTLEILDITPCSFGGVSVITPGTNTSNQVAVLYQDVNCTEVPVAIHADQLTPTWRVYSTGSNVFQTRAGCLIGAEHVNNSYECDIPIGAGICASYQTQTNSPSRAGSVASQSIIAYTMSLGAENSVAYSNNSIAIPTNFTISVTTEILPVSMTKTSVDCTMYICGDSTECSNLLLQYGSFCTQLNRALTGIAVEQDKNTQEVFAQVKQIYKTPPIKDFGGFNFSQILPDPSKPSKRSFIEDLLFNKVTLADAGFIKQYGDCLGDIAARDLICAQKFNGLTVLPPLLTDEMIAQYTSALLACTITSGWTCGAGAALQIPFAMQMAYRFNGIGVTQNVLYENQKLIANQFNSAIGKIQDSLSSTPSALGKLQDVVNQNAQALNTLVKQLSSNFGAISSVLNDILSRLDKVEAEVQIDRLITGRLQSLQTYVTQQLIRAAEIRASANLAATKMSECVLGQSKRVDFCGKGYHLMSFPQSAPHGVVFLHVTYVPAQEKNFTTAPAICHDGKAHFPREGVFVSNGTHWFVTQRNFYEPQIITTDNTFVSGNCDVVIGIVNNTVYDPLQPELDSFKEELDKYFKNHTSPDVDLGDISGINASVVNIQKEIDRLNEVAKNLNESLIDLQELGKYEQGSGYIPEAPRDGQAYVRKDGEWVLLSTFLGRSLEVLFQGPGSLPETGGGSDYKDDDDKGGGGSGGGGSGGGGSGGGGSGGGGSHHHHHH

SEQ ID NO: 52 - protein, 1297 aa, Artificial Sequence
  source: /note="Description of Artificial Sequence: Synthetic polypeptide"
MFVFLVLLPLVSSQCVNLTTRTQLPPAYTNSFTRGVYYPDKVFRSSVLHSTQDLFLPFFSNVTWFHAIHVSGTNGTKRFDNPVLPFNDGVYFASTEKSNIIRGWIFGTTLDSKTQSLLIVNNATNVVIKVCEFQFCNDPFLGVYYHKNNKSWMESEFRVYSSANNCTFEYVSQPFLMDLEGKQGNFKNLREFVFKNIDGYFKIYSKHTPINLVRDLPQGFSALEPLVDLPIGINITRFQTLLALHRSYLTPGDSSSGWTAGAAAYYVGYLQPRTFLLKYNENGTITDAVDCALDPLSETKCTLKSFTVEKGIYQTSNFRVQPTESIVRFPNITNLCPFGEVFNATRFASVYAWNRKRISNCVADYSVLYNSASFSTFKCYGVSPTKLNDLCFTNVYADSFVIRGDEVRQIAPGQTGKIADYNYKLPDDFTGCVIAWNSNNLDSKVGGNYNYLYRLFRKSNLKPFERDISTEIYQAGSTPCNGVEGFNCYFPLQSYGFQPTNGVGYQPYRVVVLSFELLHAPATVCGPKKSTPLVKNKCVNFNFNGLTGTGVLTESNKKFLPFQQFGRDIADTTDAVRDPQTLEILDITPCSFGGVSVITPGTNTSNQVAVLYQDVNCTEVPVAIHADQLTPTWRVYSTGSNVFQTRAGCLIGAEHVNNSYECDIPIGAGICASYQTQTNSPSRAGSVASQSIIAYTMSLGAENSVAYSNNSIAIPTNFTISVTTEILPVSMTKTSVDCTMYICGDSTECSNLLLQYGSFCTQLNRALTGIAVEQDKNTQEVFAQVKQIYKTPPIKDFGGFNFSQILPDPSKPSKRSFIEDLLFNKVTLADAGFIKQYGDCLGDIAARDLICAQKFNGLTVLPPLLTDEMIAQYTSALLAGTITCGWTFGAGACLQIPFAMQMAYRFNGIGVTQNVLYENQKLIANQFNSAIGKIQDSLSSTPSALGKLQDVVNQNAQALNTLVKQLSSNFGAISSVLNDILSRLDKVEAEVQIDRLITGRLQSLQTYVTQQLIRAAEIRASANLAATKMSECVLGQSKRVDFCGKGYHLMSFPQSAPHGVVFLHVTYVPAQEKNFTTAPAICHDGKAHFPREGVFVSNGTHWFVTQRNFYEPQIITTDNTFVSGNCDVVIGIVNNTVYDPLQPELDSFKEELDKYFKNHTSPDVDLGDISGINASVVNIQKEIDRLNEVAKNLNESLIDLQELGKYEQGSGYIPEAPRDGQAYVRKDGEWVLLSTFLGRSLEVLFQGPGSLPETGGGSDYKDDDDKGGGGSGGGGSGGGGSGGGGSGGGGSHHHHHH

SEQ ID NO: 53 - protein, 1297 aa, Artificial Sequence
  source: /note="Description of Artificial Sequence: Synthetic polypeptide"
MFVFLVLLPLVSSQCVNLTTRTQLPPAYTNSFTRGVYYPDKVFRSSVLHSTQDLFLPFFSNVTWFHAIHVSGTNGTKRFDNPVLPFNDGVYFASTEKSNIIRGWIFGTTLDSKTQSLLIVNNATNVVIKVCEFQFCNDPFLGVYYHKNNKSWMESEFRVYSSANNCTFEYVSQPFLMDLEGKQGNFKNLREFVFKNIDGYFKIYSKHTPINLVRDLPQGFSALEPLVDLPIGINITRFQTLLALHRSYLTPGDSSSGWTAGAAAYYVGYLQPRTFLLKYNENGTITDAVDCALDPLSETKCTLKSFTVEKGIYQTSNFRVQPTESIVRFPNITNLCPFGEVFNATRFASVYAWNRKRISNCVADYSVLYNSASFSTFKCYGVSPTKLNDLCFTNVYADSFVIRGDEVRQIAPGQTGKIADYNYKLPDDFTGCVIAWNSNNLDSKVGGNYNYLYRLFRKSNLKPFERDISTEIYQAGSTPCNGVEGFNCYFPLQSYGFQPTNGVGYQPYRVVVLSFELLHAPATVCGPKKSTNLVKNKCVNFNFNGLTGTGVLTESNKKFLPFQQFGRDIADITDAVRDPQTLEILDITPCSFGGVSVITPGTNTSNQVAVLYQNVNCTEVPVAIHADQLTPTWRVYSTGSNVFQTRAGCLIGAEHVNNSYECDIPIGAGICASYQTQTNSPSRAGSVASQSIIAYTMSLGAENSVAYSNNSIAIPTNFTISVTTEILPVSMTKTSVDCTMYICGDSTECSNLLLQYGSFCTQLNRALTGIAVEQDKNTQEVFAQVKQIYKTPPIKDFGGFNFSQILPDPSKPSKRSFIEDLLFNKVTLADAGFIKQYGDCLGDIAARDLICAQKFNGLTVLPPLLTDEMIAQYTSALLAGTITSGWTFGAGPALQIPFAMQMAYRFNGIGVTQNVLYENQKLIANQFNSAIGKIQDSLSSTASALGKLQDVVNQNAQALNTLVKQLSSNFGAISSVLNDILSRLDKVEAEVQIDRLITGRLQSLQTYVTQQLIRAAEIRASANLAATKMSECVLGQSKRVDFCGKGYHLMSFPQSAPHGVVFLHVTYVPAQEKNFTTAPAICHDGKAHFPREGVFVSNGTHWFVTQRNFYEPQIITTDNTFVSGNCDVVIGIVNNTVYDPLQPELDSFKEELDKYFKNHTSPDVDLGDISGINASVVNIQKEIDRLNEVAKNLNESLIDLQELGKYEQGSGYIPEAPRDGQAYVRKDGEWVLLSTFLGRSLEVLFQGPGSLPETGGGSDYKDDDDKGGGGSGGGGSGGGGSGGGGSGGGGSHHHHHH

SEQ ID NO: 54 - protein, 1297 aa, Artificial Sequence
  source: /note="Description of Artificial Sequence: Synthetic polypeptide"
MFVFLVLLPLVSSQCVNLTTRTQLPPAYTNSFTRGVYYPDKVFRSSVLHSTQDLFLPFFSNVTWFHAIHVSGTNGTKRFDNPVLPFNDGVYFASTEKSNIIRGWIFGTTLDSKTQSLLIVNNATNVVIKVCEFQFCNDPFLGVYYHKNNKSWMESEFRVYSSANNCTFEYVSQPFLMDLEGKQGNFKNLREFVFKNIDGYFKIYSKHTPINLVRDLPQGFSALEPLVDLPIGINITRFQTLLALHRSYLTPGDSSSGWTAGAAAYYVGYLQPRTFLLKYNENGTITDAVDCALDPLSETKCTLKSFTVEKGIYQTSNFRVQPTESIVRFPNITNLCPFGEVFNATRFASVYAWNRKRISNCVADYSVLYNSASFSTFKCYGVSPTKLNDLCFTNVYADSFVIRGDEVRQIAPGQTGKIADYNYKLPDDFTGCVIAWNSNNLDSKVGGNYNYLYRLFRKSNLKPFERDISTEIYQAGSTPCNGVEGFNCYFPLQSYGFQPTNGVGYQPYRVVVLSFELLHAPATVCGPKKSTPLVKNKCVNFNFNGLTGTGVLTESNKKFLPFQQFGRDIADTTDAVRDPQTLEILDITPCSFGGVSVITPGTNTSNQVAVLYQNVNCTEVPVAIHADQLTPTWRVYSTGSNVFQTRAGCLIGAEHVNNSYECDIPIGAGICASYQTQTNSPSRAGSVASQSIIAYTMSLGAENSVAYSNNSIAIPTNFTISVTTEILPVSMTKTSVDCTMYICGDSTECSNLLLQYGSFCTQLNRALTGIAVEQDKNTQEVFAQVKQIYKTPPIKDFGGFNFSQILPDPSKPSKRSFIEDLLFNKVTLADAGFIKQYGDCLGDIAARDLICAQKFNGLTVLPPLLTDEMIAQYTSALLAGTITSGWTFGAGPALQIPFAMQMAYRFNGIGVTQNVLYENQKLIANQFNSAIGKIQDSLSSTASALGKLQDVVNQNAQALNTLVKQLSSNFGAISSVLNDILSRLDKVEAEVQIDRLITGRLQSLQTYVTQQLIRAAEIRASANLAATKMSECVLGQSKRVDFCGKGYHLMSFPQSAPHGVVFLHVTYVPAQEKNFTTAPAICHDGKAHFPREGVFVSNGTHWFVTQRNFYEPQIITTDNTFVSGNCDVVIGIVNNTVYDPLQPELDSFKEELDKYFKNHTSPDVDLGDISGINASVVNIQKEIDRLNEVAKNLNESLIDLQELGKYEQGSGYIPEAPRDGQAYVRKDGEWVLLSTFLGRSLEVLFQGPGSLPETGGGSDYKDDDDKGGGGSGGGGSGGGGSGGGGSGGGGSHHHHHH

SEQ ID NO: 55 - protein, 1297 aa, Artificial Sequence
  source: /note="Description of Artificial Sequence: Synthetic polypeptide"
MFVFLVLLPLVSSQCVNLTTRTQLPPAYTNSFTRGVYYPDKVFRSSVLHSTQDLFLPFFSNVTWFHAIHVSGTNGTKRFDNPVLPFNDGVYFASTEKSNIIRGWIFGTTLDSKTQSLLIVNNATNVVIKVCEFQFCNDPFLGVYYHKNNKSWMESEFRVYSSANNCTFEYVSQPFLMDLEGKQGNFKNLREFVFKNIDGYFKIYSKHTPINLVRDLPQGFSALEPLVDLPIGINITRFQTLLALHRSYLTPGDSSSGWTAGAAAYYVGYLQPRTFLLKYNENGTITDAVDCALDPLSETKCTLKSFTVEKGIYQTSNFRVQPTESIVRFPNITNLCPFGEVFNATRFASVYAWNRKRISNCVADYSVLYNSASFSTFKCYGVSPTKLNDLCFTNVYADSFVIRGDEVRQIAPGQTGKIADYNYKLPDDFTGCVIAWNSNNLDSKVGGNYNYLYRLFRKSNLKPFERDISTEIYQAGSTPCNGVEGFNCYFPLQSYGFQPTNGVGYQPYRVVVLSFELLHAPATVCGPKKSTNLVKNKCVNFNFNGLTGTGVLTESNKKFLPFQQFGRDIADTTDAVRDPQTLEILDITPCSFGGVSVITPGTNTSNQVAVLYQNVNCTEVPVAIHADQLTPTWRVYSTGSNVFQTRAGCLIGAEHVNNSYECDIPIGAGICASYQTQTNSPSRAGSVASQSIIAYTMSLGAENSVAYSNNSIAIPTNFTISVTTEILPVSMTKTSVDCTMYICGDSTECSNLLLQYGSFCTQLNRALTGIAVEQDKNTQEVFAQVKQIYKTPPIKDFGGFNFSQILPDPSKPSKRSFIEDLLFNKVTLADAGFIKQYGDCLGDIAARDLICAQKFNGLTVLPPLLTDEMIAQYTSALLACTITSGWTCGAGPALQIPFAMQMAYRFNGIGVTQNVLYENQKLIANQFNSAIGKIQDSLSSTASALGKLQDVVNQNAQALNTLVKQLSSNFGAISSVLNDILSRLDKVEAEVQIDRLITGRLQSLQTYVTQQLIRAAEIRASANLAATKMSECVLGQSKRVDFCGKGYHLMSFPQSAPHGVVFLHVTYVPAQEKNFTTAPAICHDGKAHFPREGVFVSNGTHWFVTQRNFYEPQIITTDNTFVSGNCDVVIGIVNNTVYDPLQPELDSFKEELDKYFKNHTSPDVDLGDISGINASVVNIQKEIDRLNEVAKNLNESLIDLQELGKYEQGSGYIPEAPRDGQAYVRKDGEWVLLSTFLGRSLEVLFQGPGSLPETGGGSDYKDDDDKGGGGSGGGGSGGGGSGGGGSGGGGSHHHHHH

SEQ ID NO: 56 - protein, 1297 aa, Artificial Sequence
  source: /note="Description of Artificial Sequence: Synthetic polypeptide"
MFVFLVLLPLVSSQCVNLTTRTQLPPAYTNSFTRGVYYPDKVFRSSVLHSTQDLFLPFFSNVTWFHAIHVSGTNGTKRFDNPVLPFNDGVYFASTEKSNIIRGWIFGTTLDSKTQSLLIVNNATNVVIKVCEFQFCNDPFLGVYYHKNNKSWMESEFRVYSSANNCTFEYVSQPFLMDLEGKQGNFKNLREFVFKNIDGYFKIYSKHTPINLVRDLPQGFSALEPLVDLPIGINITRFQTLLALHRSYLTPGDSSSGWTAGAAAYYVGYLQPRTFLLKYNENGTITDAVDCALDPLSETKCTLKSFTVEKGIYQTSNFRVQPTESIVRFPNITNLCPFGEVFNATRFASVYAWNRKRISNCVADYSVLYNSASFSTFKCYGVSPTKLNDLCFTNVYADSFVIRGDEVRQIAPGQTGKIADYNYKLPDDFTGCVIAWNSNNLDSKVGGNYNYLYRLFRKSNLKPFERDISTEIYQAGSTPCNGVEGFNCYFPLQSYGFQPTNGVGYQPYRVVVLSFELLHAPATVCGPKKSTNLVKNKCVNFNFNGLTGTGVLTESNKKFLPFQQFGRDIADTTDAVRDPQTLEILDITPCSFGGVSVITPGTNTSNQVAVLYQNVNCTEVPVAIHADQLTPTWRVYSTGSNVFQTRAGCLIGAEHVNNSYECDIPIGAGICASYQTQTNSPSRAGSVASQSIIAYTMSLGAENSVAYSNNSIAIPTNFTISVTTEILPVSMTKTSVDCTMYICGDSTECSNLLLQYGSFCTQLNRALTGIAVEQDKNTQEVFAQVKQIYKTPPIKDFGGFNFSQILPDPSKPSKRSFIEDLLFNKVTLADAGFIKQYGDCLGDIAARDLICAQKFNGLTVLPPLLTDEMIAQYTSALLAGTITCGWTFGAGPCLQIPFAMQMAYRFNGIGVTQNVLYENQKLIANQFNSAIGKIQDSLSSTASALGKLQDVVNQNAQALNTLVKQLSSNFGAISSVLNDILSRLDKVEAEVQIDRLITGRLQSLQTYVTQQLIRAAEIRASANLAATKMSECVLGQSKRVDFCGKGYHLMSFPQSAPHGVVFLHVTYVPAQEKNFTTAPAICHDGKAHFPREGVFVSNGTHWFVTQRNFYEPQIITTDNTFVSGNCDVVIGIVNNTVYDPLQPELDSFKEELDKYFKNHTSPDVDLGDISGINASVVNIQKEIDRLNEVAKNLNESLIDLQELGKYEQGSGYIPEAPRDGQAYVRKDGEWVLLSTFLGRSLEVLFQGPGSLPETGGGSDYKDDDDKGGGGSGGGGSGGGGSGGGGSGGGGSHHHHHH

SEQ ID NO: 57 - protein, 1297 aa, Artificial Sequence
  source: /note="Description of Artificial Sequence: Synthetic polypeptide"
MFVFLVLLPLVSSQCVNLTTRTQLPPAYTNSFTRGVYYPDKVFRSSVLHSTQDLFLPFFSNVTWFHAIHVSGTNGTKRFDNPVLPFNDGVYFASTEKSNIIRGWIFGTTLDSKTQSLLIVNNATNVVIKVCEFQFCNDPFLGVYYHKNNKSWMESEFRVYSSANNCTFEYVSQPFLMDLEGKQGNFKNLREFVFKNIDGYFKIYSKHTPINLVRDLPQGFSALEPLVDLPIGINITRFQTLLALHRSYLTPGDSSSGWTAGAAAYYVGYLQPRTFLLKYNENGTITDAVDCALDPLSETKCTLKSFTVEKGIYQTSNFRVQPTESIVRFPNITNLCPFGEVFNATRFASVYAWNRKRISNCVADYSVLYNSASFSTFKCYGVSPTKLNDLCFTNVYADSFVIRGDEVRQIAPGQTGKIADYNYKLPDDFTGCVIAWNSNNLDSKVGGNYNYLYRLFRKSNLKPFERDISTEIYQAGSTPCNGVEGFNCYFPLQSYGFQPTNGVGYQPYRVVVLSFELLHAPATVCGPKKSTPLVKNKCVNFNFNGLTGTGVLTESNKKFLPFQQFGRDIADITDAVRDPQTLEILDITPCSFGGVSVITPGTNTSNQVAVLYQDVNCTEVPVAIHADQLTPTWRVYSTGSNVFQTRAGCLIGAEHVNNSYECDIPIGAGICASYQTQTNSPSRAGSVASQSIIAYTMSLGAENSVAYSNNSIAIPTNFTISVTTEILPVSMTKTSVDCTMYICGDSTECSNLLLQYGSFCTQLNRALTGIAVEQDKNTQEVFAQVKQIYKTPPIKDFGGFNFSQILPDPSKPSKRSFIEDLLFNKVTLADAGFIKQYGDCLGDIAARDLICAQKFNGLTVLPPLLTDEMIAQYTSALLAGTITSGWTFGAGPALQIPFAMQMAYRFNGIGVTQNVLYENQKLIANQFNSAIGKIQDSLSSTASALGKLQDVVNQNAQALNTLVKQLSSNFGAISSVLNDILSRLDKVEAEVQIDRLITGRLQSLQTYVTQQLIRAAEIRASANLAATKMSECVLGQSKRVDFCGKGYHLMSFPQSAPHGVVFLHVTYVPAQEKNFTTAPAICHDGKAHFPREGVFVSNGTHWFVTQRNFYEPQIITTDNTFVSGNCDVVIGIVNNTVYDPLQPELDSFKEELDKYFKNHTSPDVDLGDISGINASVVNIQKEIDRLNEVAKNLNESLIDLQELGKYEQGSGYIPEAPRDGQAYVRKDGEWVLLSTFLGRSLEVLFQGPGSLPETGGGSDYKDDDDKGGGGSGGGGSGGGGSGGGGSGGGGSHHHHHH

SEQ ID NO: 58 - protein, 1297 aa, Artificial Sequence
  source: /note="Description of Artificial Sequence: Synthetic polypeptide"
MFVFLVLLPLVSSQCVNLTTRTQLPPAYTNSFTRGVYYPDKVFRSSVLHSTQDLFLPFFSNVTWFHAIHVSGTNGTKRFDNPVLPFNDGVYFASTEKSNIIRGWIFGTTLDSKTQSLLIVNNATNVVIKVCEFQFCNDPFLGVYYHKNNKSWMESEFRVYSSANNCTFEYVSQPFLMDLEGKQGNFKNLREFVFKNIDGYFKIYSKHTPINLVRDLPQGFSALEPLVDLPIGINITRFQTLLALHRSYLTPGDSSSGWTAGAAAYYVGYLQPRTFLLKYNENGTITDAVDCALDPLSETKCTLKSFTVEKGIYQTSNFRVQPTESIVRFPNITNLCPFGEVFNATRFASVYAWNRKRISNCVADYSVLYNSASFSTFKCYGVSPTKLNDLCFTNVYADSFVIRGDEVRQIAPGQTGKIADYNYKLPDDFTGCVIAWNSNNLDSKVGGNYNYLYRLFRKSNLKPFERDISTEIYQAGSTPCNGVEGFNCYFPLQSYGFQPTNGVGYQPYRVVVLSFELLHAPATVCGPKKSTNLVKNKCVNFNFNGLTGTGVLTESNKKFLPFQQFGRDIADITDAVRDPQTLEILDITPCSFGGVSVITPGTNTSNQVAVLYQDVNCTEVPVAIHADQLTPTWRVYSTGSNVFQTRAGCLIGAEHVNNSYECDIPIGAGICASYQTQTNSPSRAGSVASQSIIAYTMSLGAENSVAYSNNSIAIPTNFTISVTTEILPVSMTKTSVDCTMYICGDSTECSNLLLQYGSFCTQLNRALTGIAVEQDKNTQEVFAQVKQIYKTPPIKDFGGFNFSQILPDPSKPSKRSFIEDLLFNKVTLADAGFIKQYGDCLGDIAARDLICAQKFNGLTVLPPLLTDEMIAQYTSALLACTITSGWTCGAGPALQIPFAMQMAYRFNGIGVTQNVLYENQKLIANQFNSAIGKIQDSLSSTASALGKLQDVVNQNAQALNTLVKQLSSNFGAISSVLNDILSRLDKVEAEVQIDRLITGRLQSLQTYVTQQLIRAAEIRASANLAATKMSECVLGQSKRVDFCGKGYHLMSFPQSAPHGVVFLHVTYVPAQEKNFTTAPAICHDGKAHFPREGVFVSNGTHWFVTQRNFYEPQIITTDNTFVSGNCDVVIGIVNNTVYDPLQPELDSFKEELDKYFKNHTSPDVDLGDISGINASVVNIQKEIDRLNEVAKNLNESLIDLQELGKYEQGSGYIPEAPRDGQAYVRKDGEWVLLSTFLGRSLEVLFQGPGSLPETGGGSDYKDDDDKGGGGSGGGGSGGGGSGGGGSGGGGSHHHHHH

SEQ ID NO: 59 - protein, 1297 aa, Artificial Sequence
  source: /note="Description of Artificial Sequence: Synthetic polypeptide"
MFVFLVLLPLVSSQCVNLTTRTQLPPAYTNSFTRGVYYPDKVFRSSVLHSTQDLFLPFFSNVTWFHAIHVSGTNGTKRFDNPVLPFNDGVYFASTEKSNIIRGWIFGTTLDSKTQSLLIVNNATNVVIKVCEFQFCNDPFLGVYYHKNNKSWMESEFRVYSSANNCTFEYVSQPFLMDLEGKQGNFKNLREFVFKNIDGYFKIYSKHTPINLVRDLPQGFSALEPLVDLPIGINITRFQTLLALHRSYLTPGDSSSGWTAGAAAYYVGYLQPRTFLLKYNENGTITDAVDCALDPLSETKCTLKSFTVEKGIYQTSNFRVQPTESIVRFPNITNLCPFGEVFNATRFASVYAWNRKRISNCVADYSVLYNSASFSTFKCYGVSPTKLNDLCFTNVYADSFVIRGDEVRQIAPGQTGKIADYNYKLPDDFTGCVIAWNSNNLDSKVGGNYNYLYRLFRKSNLKPFERDISTEIYQAGSTPCNGVEGFNCYFPLQSYGFQPTNGVGYQPYRVVVLSFELLHAPATVCGPKKSTNLVKNKCVNFNFNGLTGTGVLTESNKKFLPFQQFGRDIADITDAVRDPQTLEILDITPCSFGGVSVITPGTNTSNQVAVLYQDVNCTEVPVAIHADQLTPTWRVYSTGSNVFQTRAGCLIGAEHVNNSYECDIPIGAGICASYQTQTNSPSRAGSVASQSIIAYTMSLGAENSVAYSNNSIAIPTNFTISVTTEILPVSMTKTSVDCTMYICGDSTECSNLLLQYGSFCTQLNRALTGIAVEQDKNTQEVFAQVKQIYKTPPIKDFGGFNFSQILPDPSKPSKRSFIEDLLFNKVTLADAGFIKQYGDCLGDIAARDLICAQKFNGLTVLPPLLTDEMIAQYTSALLAGTITCGWTFGAGPCLQIPFAMQMAYRFNGIGVTQNVLYENQKLIANQFNSAIGKIQDSLSSTASALGKLQDVVNQNAQALNTLVKQLSSNFGAISSVLNDILSRLDKVEAEVQIDRLITGRLQSLQTYVTQQLIRAAEIRASANLAATKMSECVLGQSKRVDFCGKGYHLMSFPQSAPHGVVFLHVTYVPAQEKNFTTAPAICHDGKAHFPREGVFVSNGTHWFVTQRNFYEPQIITTDNTFVSGNCDVVIGIVNNTVYDPLQPELDSFKEELDKYFKNHTSPDVDLGDISGINASVVNIQKEIDRLNEVAKNLNESLIDLQELGKYEQGSGYIPEAPRDGQAYVRKDGEWVLLSTFLGRSLEVLFQGPGSLPETGGGSDYKDDDDKGGGGSGGGGSGGGGSGGGGSGGGGSHHHHHH

SEQ ID NO: 60 - protein, 1297 aa, Artificial Sequence
  source: /note="Description of Artificial Sequence: Synthetic polypeptide"
MFVFLVLLPLVSSQCVNLTTRTQLPPAYTNSFTRGVYYPDKVFRSSVLHSTQDLFLPFFSNVTWFHAIHVSGTNGTKRFDNPVLPFNDGVYFASTEKSNIIRGWIFGTTLDSKTQSLLIVNNATNVVIKVCEFQFCNDPFLGVYYHKNNKSWMESEFRVYSSANNCTFEYVSQPFLMDLEGKQGNFKNLREFVFKNIDGYFKIYSKHTPINLVRDLPQGFSALEPLVDLPIGINITRFQTLLALHRSYLTPGDSSSGWTAGAAAYYVGYLQPRTFLLKYNENGTITDAVDCALDPLSETKCTLKSFTVEKGIYQTSNFRVQPTESIVRFPNITNLCPFGEVFNATRFASVYAWNRKRISNCVADYSVLYNSASFSTFKCYGVSPTKLNDLCFTNVYADSFVIRGDEVRQIAPGQTGKIADYNYKLPDDFTGCVIAWNSNNLDSKVGGNYNYLYRLFRKSNLKPFERDISTEIYQAGSTPCNGVEGFNCYFPLQSYGFQPTNGVGYQPYRVVVLSFELLHAPATVCGPKKSTPLVKNKCVNFNFNGLTGTGVLTESNKKFLPFQQFGRDIADTTDAVRDPQTLEILDITPCSFGGVSVITPGTNTSNQVAVLYQDVNCTEVPVAIHADQLTPTWRVYSTGSNVFQTRAGCLIGAEHVNNSYECDIPIGAGICASYQTQTNSPSRAGSVASQSIIAYTMSLGAENSVAYSNNSIAIPTNFTISVTTEILPVSMTKTSVDCTMYICGDSTECSNLLLQYGSFCTQLNRALTGIAVEQDKNTQEVFAQVKQIYKTPPIKDFGGFNFSQILPDPSKPSKRSFIEDLLFNKVTLADAGFIKQYGDCLGDIAARDLICAQKFNGLTVLPPLLTDEMIAQYTSALLACTITSGWTCGAGPALQIPFAMQMAYRFNGIGVTQNVLYENQKLIANQFNSAIGKIQDSLSSTASALGKLQDVVNQNAQALNTLVKQLSSNFGAISSVLNDILSRLDKVEAEVQIDRLITGRLQSLQTYVTQQLIRAAEIRASANLAATKMSECVLGQSKRVDFCGKGYHLMSFPQSAPHGVVFLHVTYVPAQEKNFTTAPAICHDGKAHFPREGVFVSNGTHWFVTQRNFYEPQIITTDNTFVSGNCDVVIGIVNNTVYDPLQPELDSFKEELDKYFKNHTSPDVDLGDISGINASVVNIQKEIDRLNEVAKNLNESLIDLQELGKYEQGSGYIPEAPRDGQAYVRKDGEWVLLSTFLGRSLEVLFQGPGSLPETGGGSDYKDDDDKGGGGSGGGGSGGGGSGGGGSGGGGSHHHHHH

SEQ ID NO: 61 - protein, 1297 aa, Artificial Sequence
  source: /note="Description of Artificial Sequence: Synthetic polypeptide"
MFVFLVLLPLVSSQCVNLTTRTQLPPAYTNSFTRGVYYPDKVFRSSVLHSTQDLFLPFFSNVTWFHAIHVSGTNGTKRFDNPVLPFNDGVYFASTEKSNIIRGWIFGTTLDSKTQSLLIVNNATNVVIKVCEFQFCNDPFLGVYYHKNNKSWMESEFRVYSSANNCTFEYVSQPFLMDLEGKQGNFKNLREFVFKNIDGYFKIYSKHTPINLVRDLPQGFSALEPLVDLPIGINITRFQTLLALHRSYLTPGDSSSGWTAGAAAYYVGYLQPRTFLLKYNENGTITDAVDCALDPLSETKCTLKSFTVEKGIYQTSNFRVQPTESIVRFPNITNLCPFGEVFNATRFASVYAWNRKRISNCVADYSVLYNSASFSTFKCYGVSPTKLNDLCFTNVYADSFVIRGDEVRQIAPGQTGKIADYNYKLPDDFTGCVIAWNSNNLDSKVGGNYNYLYRLFRKSNLKPFERDISTEIYQAGSTPCNGVEGFNCYFPLQSYGFQPTNGVGYQPYRVVVLSFELLHAPATVCGPKKSTPLVKNKCVNFNFNGLTGTGVLTESNKKFLPFQQFGRDIADTTDAVRDPQTLEILDITPCSFGGVSVITPGTNTSNQVAVLYQDVNCTEVPVAIHADQLTPTWRVYSTGSNVFQTRAGCLIGAEHVNNSYECDIPIGAGICASYQTQTNSPSRAGSVASQSIIAYTMSLGAENSVAYSNNSIAIPTNFTISVTTEILPVSMTKTSVDCTMYICGDSTECSNLLLQYGSFCTQLNRALTGIAVEQDKNTQEVFAQVKQIYKTPPIKDFGGFNFSQILPDPSKPSKRSFIEDLLFNKVTLADAGFIKQYGDCLGDIAARDLICAQKFNGLTVLPPLLTDEMIAQYTSALLAGTITCGWTFGAGPCLQIPFAMQMAYRFNGIGVTQNVLYENQKLIANQFNSAIGKIQDSLSSTASALGKLQDVVNQNAQALNTLVKQLSSNFGAISSVLNDILSRLDKVEAEVQIDRLITGRLQSLQTYVTQQLIRAAEIRASANLAATKMSECVLGQSKRVDFCGKGYHLMSFPQSAPHGVVFLHVTYVPAQEKNFTTAPAICHDGKAHFPREGVFVSNGTHWFVTQRNFYEPQIITTDNTFVSGNCDVVIGIVNNTVYDPLQPELDSFKEELDKYFKNHTSPDVDLGDISGINASVVNIQKEIDRLNEVAKNLNESLIDLQELGKYEQGSGYIPEAPRDGQAYVRKDGEWVLLSTFLGRSLEVLFQGPGSLPETGGGSDYKDDDDKGGGGSGGGGSGGGGSGGGGSGGGGSHHHHHH

SEQ ID NO: 62 - protein, 1297 aa, Artificial Sequence
  source: /note="Description of Artificial Sequence: Synthetic polypeptide"
MFVFLVLLPLVSSQCVNLTTRTQLPPAYTNSFTRGVYYPDKVFRSSVLHSTQDLFLPFFSNVTWFHAIHVSGTNGTKRFDNPVLPFNDGVYFASTEKSNIIRGWIFGTTLDSKTQSLLIVNNATNVVIKVCEFQFCNDPFLGVYYHKNNKSWMESEFRVYSSANNCTFEYVSQPFLMDLEGKQGNFKNLREFVFKNIDGYFKIYSKHTPINLVRDLPQGFSALEPLVDLPIGINITRFQTLLALHRSYLTPGDSSSGWTAGAAAYYVGYLQPRTFLLKYNENGTITDAVDCALDPLSETKCTLKSFTVEKGIYQTSNFRVQPTESIVRFPNITNLCPFGEVFNATRFASVYAWNRKRISNCVADYSVLYNSASFSTFKCYGVSPTKLNDLCFTNVYADSFVIRGDEVRQIAPGQTGKIADYNYKLPDDFTGCVIAWNSNNLDSKVGGNYNYLYRLFRKSNLKPFERDISTEIYQAGSTPCNGVEGFNCYFPLQSYGFQPTNGVGYQPYRVVVLSFELLHAPATVCGPKKSTPLVKNKCVNFNFNGLTGTGVLTESNKKFLPFQQFGRDIADITDAVRDPQTLEILDITPCSFGGVSVITPGTNTSNQVAVLYQNVNCTEVPVAIHADQLTPTWRVYSTGSNVFQTRAGCLIGAEHVNNSYECDIPIGAGICASYQTQTNSPSRAGSVASQSIIAYTMSLGAENSVAYSNNSIAIPTNFTISVTTEILPVSMTKTSVDCTMYICGDSTECSNLLLQYGSFCTQLNRALTGIAVEQDKNTQEVFAQVKQIYKTPPIKDFGGFNFSQILPDPSKPSKRSFIEDLLFNKVTLADAGFIKQYGDCLGDIAARDLICAQKFNGLTVLPPLLTDEMIAQYTSALLAGTITSGWTFGAGAALQIPFAMQMAYRFNGIGVTQNVLYENQKLIANQFNSAIGKIQDSLSSTASALGKLQDVVNQNAQALNTLVKQLSSNFGAISSVLNDILSRLDKVEAEVQIDRLITGRLQSLQTYVTQQLIRAAEIRASANLAATKMSECVLGQSKRVDFCGKGYHLMSFPQSAPHGVVFLHVTYVPAQEKNFTTAPAICHDGKAHFPREGVFVSNGTHWFVTQRNFYEPQIITTDNTFVSGNCDVVIGIVNNTVYDPLQPELDSFKEELDKYFKNHTSPDVDLGDISGINASVVNIQKEIDRLNEVAKNLNESLIDLQELGKYEQGSGYIPEAPRDGQAYVRKDGEWVLLSTFLGRSLEVLFQGPGSLPETGGGSDYKDDDDKGGGGSGGGGSGGGGSGGGGSGGGGSHHHHHH

SEQ ID NO: 63 - protein, 1297 aa, Artificial Sequence
  source: /note="Description of Artificial Sequence: Synthetic polypeptide"
MFVFLVLLPLVSSQCVNLTTRTQLPPAYTNSFTRGVYYPDKVFRSSVLHSTQDLFLPFFSNVTWFHAIHVSGTNGTKRFDNPVLPFNDGVYFASTEKSNIIRGWIFGTTLDSKTQSLLIVNNATNVVIKVCEFQFCNDPFLGVYYHKNNKSWMESEFRVYSSANNCTFEYVSQPFLMDLEGKQGNFKNLREFVFKNIDGYFKIYSKHTPINLVRDLPQGFSALEPLVDLPIGINITRFQTLLALHRSYLTPGDSSSGWTAGAAAYYVGYLQPRTFLLKYNENGTITDAVDCALDPLSETKCTLKSFTVEKGIYQTSNFRVQPTESIVRFPNITNLCPFGEVFNATRFASVYAWNRKRISNCVADYSVLYNSASFSTFKCYGVSPTKLNDLCFTNVYADSFVIRGDEVRQIAPGQTGKIADYNYKLPDDFTGCVIAWNSNNLDSKVGGNYNYLYRLFRKSNLKPFERDISTEIYQAGSTPCNGVEGFNCYFPLQSYGFQPTNGVGYQPYRVVVLSFELLHAPATVCGPKKSTNLVKNKCVNFNFNGLTGTGVLTESNKKFLPFQQFGRDIADITDAVRDPQTLEILDITPCSFGGVSVITPGTNTSNQVAVLYQNVNCTEVPVAIHADQLTPTWRVYSTGSNVFQTRAGCLIGAEHVNNSYECDIPIGAGICASYQTQTNSPSRAGSVASQSIIAYTMSLGAENSVAYSNNSIAIPTNFTISVTTEILPVSMTKTSVDCTMYICGDSTECSNLLLQYGSFCTQLNRALTGIAVEQDKNTQEVFAQVKQIYKTPPIKDFGGFNFSQILPDPSKPSKRSFIEDLLFNKVTLADAGFIKQYGDCLGDIAARDLICAQKFNGLTVLPPLLTDEMIAQYTSALLACTITSGWTCGAGAALQIPFAMQMAYRFNGIGVTQNVLYENQKLIANQFNSAIGKIQDSLSSTASALGKLQDVVNQNAQALNTLVKQLSSNFGAISSVLNDILSRLDKVEAEVQIDRLITGRLQSLQTYVTQQLIRAAEIRASANLAATKMSECVLGQSKRVDFCGKGYHLMSFPQSAPHGVVFLHVTYVPAQEKNFTTAPAICHDGKAHFPREGVFVSNGTHWFVTQRNFYEPQIITTDNTFVSGNCDVVIGIVNNTVYDPLQPELDSFKEELDKYFKNHTSPDVDLGDISGINASVVNIQKEIDRLNEVAKNLNESLIDLQELGKYEQGSGYIPEAPRDGQAYVRKDGEWVLLSTFLGRSLEVLFQGPGSLPETGGGSDYKDDDDKGGGGSGGGGSGGGGSGGGGSGGGGSHHHHHH

SEQ ID NO: 64 - protein, 1297 aa, Artificial Sequence
  source: /note="Description of Artificial Sequence: Synthetic polypeptide"
MFVFLVLLPLVSSQCVNLTTRTQLPPAYTNSFTRGVYYPDKVFRSSVLHSTQDLFLPFFSNVTWFHAIHVSGTNGTKRFDNPVLPFNDGVYFASTEKSNIIRGWIFGTTLDSKTQSLLIVNNATNVVIKVCEFQFCNDPFLGVYYHKNNKSWMESEFRVYSSANNCTFEYVSQPFLMDLEGKQGNFKNLREFVFKNIDGYFKIYSKHTPINLVRDLPQGFSALEPLVDLPIGINITRFQTLLALHRSYLTPGDSSSGWTAGAAAYYVGYLQPRTFLLKYNENGTITDAVDCALDPLSETKCTLKSFTVEKGIYQTSNFRVQPTESIVRFPNITNLCPFGEVFNATRFASVYAWNRKRISNCVADYSVLYNSASFSTFKCYGVSPTKLNDLCFTNVYADSFVIRGDEVRQIAPGQTGKIADYNYKLPDDFTGCVIAWNSNNLDSKVGGNYNYLYRLFRKSNLKPFERDISTEIYQAGSTPCNGVEGFNCYFPLQSYGFQPTNGVGYQPYRVVVLSFELLHAPATVCGPKKSTNLVKNKCVNFNFNGLTGTGVLTESNKKFLPFQQFGRDIADITDAVRDPQTLEILDITPCSFGGVSVITPGTNTSNQVAVLYQNVNCTEVPVAIHADQLTPTWRVYSTGSNVFQTRAGCLIGAEHVNNSYECDIPIGAGICASYQTQTNSPSRAGSVASQSIIAYTMSLGAENSVAYSNNSIAIPTNFTISVTTEILPVSMTKTSVDCTMYICGDSTECSNLLLQYGSFCTQLNRALTGIAVEQDKNTQEVFAQVKQIYKTPPIKDFGGFNFSQILPDPSKPSKRSFIEDLLFNKVTLADAGFIKQYGDCLGDIAARDLICAQKFNGLTVLPPLLTDEMIAQYTSALLAGTITCGWTFGAGACLQIPFAMQMAYRFNGIGVTQNVLYENQKLIANQFNSAIGKIQDSLSSTASALGKLQDVVNQNAQALNTLVKQLSSNFGAISSVLNDILSRLDKVEAEVQIDRLITGRLQSLQTYVTQQLIRAAEIRASANLAATKMSECVLGQSKRVDFCGKGYHLMSFPQSAPHGVVFLHVTYVPAQEKNFTTAPAICHDGKAHFPREGVFVSNGTHWFVTQRNFYEPQIITTDNTFVSGNCDVVIGIVNNTVYDPLQPELDSFKEELDKYFKNHTSPDVDLGDISGINASVVNIQKEIDRLNEVAKNLNESLIDLQELGKYEQGSGYIPEAPRDGQAYVRKDGEWVLLSTFLGRSLEVLFQGPGSLPETGGGSDYKDDDDKGGGGSGGGGSGGGGSGGGGSGGGGSHHHHHH

SEQ ID NO: 65 - protein, 1297 aa, Artificial Sequence
  source: /note="Description of Artificial Sequence: Synthetic polypeptide"
MFVFLVLLPLVSSQCVNLTTRTQLPPAYTNSFTRGVYYPDKVFRSSVLHSTQDLFLPFFSNVTWFHAIHVSGTNGTKRFDNPVLPFNDGVYFASTEKSNIIRGWIFGTTLDSKTQSLLIVNNATNVVIKVCEFQFCNDPFLGVYYHKNNKSWMESEFRVYSSANNCTFEYVSQPFLMDLEGKQGNFKNLREFVFKNIDGYFKIYSKHTPINLVRDLPQGFSALEPLVDLPIGINITRFQTLLALHRSYLTPGDSSSGWTAGAAAYYVGYLQPRTFLLKYNENGTITDAVDCALDPLSETKCTLKSFTVEKGIYQTSNFRVQPTESIVRFPNITNLCPFGEVFNATRFASVYAWNRKRISNCVADYSVLYNSASFSTFKCYGVSPTKLNDLCFTNVYADSFVIRGDEVRQIAPGQTGKIADYNYKLPDDFTGCVIAWNSNNLDSKVGGNYNYLYRLFRKSNLKPFERDISTEIYQAGSTPCNGVEGFNCYFPLQSYGFQPTNGVGYQPYRVVVLSFELLHAPATVCGPKKSTPLVKNKCVNFNFNGLTGTGVLTESNKKFLPFQQFGRDIADTTDAVRDPQTLEILDITPCSFGGVSVITPGTNTSNQVAVLYQNVNCTEVPVAIHADQLTPTWRVYSTGSNVFQTRAGCLIGAEHVNNSYECDIPIGAGICASYQTQTNSPSRAGSVASQSIIAYTMSLGAENSVAYSNNSIAIPTNFTISVTTEILPVSMTKTSVDCTMYICGDSTECSNLLLQYGSFCTQLNRALTGIAVEQDKNTQEVFAQVKQIYKTPPIKDFGGFNFSQILPDPSKPSKRSFIEDLLFNKVTLADAGFIKQYGDCLGDIAARDLICAQKFNGLTVLPPLLTDEMIAQYTSALLACTITSGWTCGAGAALQIPFAMQMAYRFNGIGVTQNVLYENQKLIANQFNSAIGKIQDSLSSTASALGKLQDVVNQNAQALNTLVKQLSSNFGAISSVLNDILSRLDKVEAEVQIDRLITGRLQSLQTYVTQQLIRAAEIRASANLAATKMSECVLGQSKRVDFCGKGYHLMSFPQSAPHGVVFLHVTYVPAQEKNFTTAPAICHDGKAHFPREGVFVSNGTHWFVTQRNFYEPQIITTDNTFVSGNCDVVIGIVNNTVYDPLQPELDSFKEELDKYFKNHTSPDVDLGDISGINASVVNIQKEIDRLNEVAKNLNESLIDLQELGKYEQGSGYIPEAPRDGQAYVRKDGEWVLLSTFLGRSLEVLFQGPGSLPETGGGSDYKDDDDKGGGGSGGGGSGGGGSGGGGSGGGGSHHHHHH

SEQ ID NO: 66 - protein, 1297 aa, Artificial Sequence
  source: /note="Description of Artificial Sequence: Synthetic polypeptide"
MFVFLVLLPLVSSQCVNLTTRTQLPPAYTNSFTRGVYYPDKVFRSSVLHSTQDLFLPFFSNVTWFHAIHVSGTNGTKRFDNPVLPFNDGVYFASTEKSNIIRGWIFGTTLDSKTQSLLIVNNATNVVIKVCEFQFCNDPFLGVYYHKNNKSWMESEFRVYSSANNCTFEYVSQPFLMDLEGKQGNFKNLREFVFKNIDGYFKIYSKHTPINLVRDLPQGFSALEPLVDLPIGINITRFQTLLALHRSYLTPGDSSSGWTAGAAAYYVGYLQPRTFLLKYNENGTITDAVDCALDPLSETKCTLKSFTVEKGIYQTSNFRVQPTESIVRFPNITNLCPFGEVFNATRFASVYAWNRKRISNCVADYSVLYNSASFSTFKCYGVSPTKLNDLCFTNVYADSFVIRGDEVRQIAPGQTGKIADYNYKLPDDFTGCVIAWNSNNLDSKVGGNYNYLYRLFRKSNLKPFERDISTEIYQAGSTPCNGVEGFNCYFPLQSYGFQPTNGVGYQPYRVVVLSFELLHAPATVCGPKKSTPLVKNKCVNFNFNGLTGTGVLTESNKKFLPFQQFGRDIADTTDAVRDPQTLEILDITPCSFGGVSVITPGTNTSNQVAVLYQNVNCTEVPVAIHADQLTPTWRVYSTGSNVFQTRAGCLIGAEHVNNSYECDIPIGAGICASYQTQTNSPSRAGSVASQSIIAYTMSLGAENSVAYSNNSIAIPTNFTISVTTEILPVSMTKTSVDCTMYICGDSTECSNLLLQYGSFCTQLNRALTGIAVEQDKNTQEVFAQVKQIYKTPPIKDFGGFNFSQILPDPSKPSKRSFIEDLLFNKVTLADAGFIKQYGDCLGDIAARDLICAQKFNGLTVLPPLLTDEMIAQYTSALLAGTITCGWTFGAGACLQIPFAMQMAYRFNGIGVTQNVLYENQKLIANQFNSAIGKIQDSLSSTASALGKLQDVVNQNAQALNTLVKQLSSNFGAISSVLNDILSRLDKVEAEVQIDRLITGRLQSLQTYVTQQLIRAAEIRASANLAATKMSECVLGQSKRVDFCGKGYHLMSFPQSAPHGVVFLHVTYVPAQEKNFTTAPAICHDGKAHFPREGVFVSNGTHWFVTQRNFYEPQIITTDNTFVSGNCDVVIGIVNNTVYDPLQPELDSFKEELDKYFKNHTSPDVDLGDISGINASVVNIQKEIDRLNEVAKNLNESLIDLQELGKYEQGSGYIPEAPRDGQAYVRKDGEWVLLSTFLGRSLEVLFQGPGSLPETGGGSDYKDDDDKGGGGSGGGGSGGGGSGGGGSGGGGSHHHHHH

SEQ ID NO: 67 - protein, 1297 aa, Artificial Sequence
  source: /note="Description of Artificial Sequence: Synthetic polypeptide"
MFVFLVLLPLVSSQCVNLTTRTQLPPAYTNSFTRGVYYPDKVFRSSVLHSTQDLFLPFFSNVTWFHAIHVSGTNGTKRFDNPVLPFNDGVYFASTEKSNIIRGWIFGTTLDSKTQSLLIVNNATNVVIKVCEFQFCNDPFLGVYYHKNNKSWMESEFRVYSSANNCTFEYVSQPFLMDLEGKQGNFKNLREFVFKNIDGYFKIYSKHTPINLVRDLPQGFSALEPLVDLPIGINITRFQTLLALHRSYLTPGDSSSGWTAGAAAYYVGYLQPRTFLLKYNENGTITDAVDCALDPLSETKCTLKSFTVEKGIYQTSNFRVQPTESIVRFPNITNLCPFGEVFNATRFASVYAWNRKRISNCVADYSVLYNSASFSTFKCYGVSPTKLNDLCFTNVYADSFVIRGDEVRQIAPGQTGKIADYNYKLPDDFTGCVIAWNSNNLDSKVGGNYNYLYRLFRKSNLKPFERDISTEIYQAGSTPCNGVEGFNCYFPLQSYGFQPTNGVGYQPYRVVVLSFELLHAPATVCGPKKSTPLVKNKCVNFNFNGLTGTGVLTESNKKFLPFQQFGRDIADITDAVRDPQTLEILDITPCSFGGVSVITPGTNTSNQVAVLYQDVNCTEVPVAIHADQLTPTWRVYSTGSNVFQTRAGCLIGAEHVNNSYECDIPIGAGICASYQTQTNSPSRAGSVASQSIIAYTMSLGAENSVAYSNNSIAIPTNFTISVTTEILPVSMTKTSVDCTMYICGDSTECSNLLLQYGSFCTQLNRALTGIAVEQDKNTQEVFAQVKQIYKTPPIKDFGGFNFSQILPDPSKPSKRSFIEDLLFNKVTLADAGFIKQYGDCLGDIAARDLICAQKFNGLTVLPPLLTDEMIAQYTSALLACTITSGWTCGAGAALQIPFAMQMAYRFNGIGVTQNVLYENQKLIANQFNSAIGKIQDSLSSTASALGKLQDVVNQNAQALNTLVKQLSSNFGAISSVLNDILSRLDKVEAEVQIDRLITGRLQSLQTYVTQQLIRAAEIRASANLAATKMSECVLGQSKRVDFCGKGYHLMSFPQSAPHGVVFLHVTYVPAQEKNFTTAPAICHDGKAHFPREGVFVSNGTHWFVTQRNFYEPQIITTDNTFVSGNCDVVIGIVNNTVYDPLQPELDSFKEELDKYFKNHTSPDVDLGDISGINASVVNIQKEIDRLNEVAKNLNESLIDLQELGKYEQGSGYIPEAPRDGQAYVRKDGEWVLLSTFLGRSLEVLFQGPGSLPETGGGSDYKDDDDKGGGGSGGGGSGGGGSGGGGSGGGGSHHHHHH

SEQ ID NO: 68 - protein, 1297 aa, Artificial Sequence
  source: /note="Description of Artificial Sequence: Synthetic polypeptide"
MFVFLVLLPLVSSQCVNLTTRTQLPPAYTNSFTRGVYYPDKVFRSSVLHSTQDLFLPFFSNVTWFHAIHVSGTNGTKRFDNPVLPFNDGVYFASTEKSNIIRGWIFGTTLDSKTQSLLIVNNATNVVIKVCEFQFCNDPFLGVYYHKNNKSWMESEFRVYSSANNCTFEYVSQPFLMDLEGKQGNFKNLREFVFKNIDGYFKIYSKHTPINLVRDLPQGFSALEPLVDLPIGINITRFQTLLALHRSYLTPGDSSSGWTAGAAAYYVGYLQPRTFLLKYNENGTITDAVDCALDPLSETKCTLKSFTVEKGIYQTSNFRVQPTESIVRFPNITNLCPFGEVFNATRFASVYAWNRKRISNCVADYSVLYNSASFSTFKCYGVSPTKLNDLCFTNVYADSFVIRGDEVRQIAPGQTGKIADYNYKLPDDFTGCVIAWNSNNLDSKVGGNYNYLYRLFRKSNLKPFERDISTEIYQAGSTPCNGVEGFNCYFPLQSYGFQPTNGVGYQPYRVVVLSFELLHAPATVCGPKKSTPLVKNKCVNFNFNGLTGTGVLTESNKKFLPFQQFGRDIADITDAVRDPQTLEILDITPCSFGGVSVITPGTNTSNQVAVLYQDVNCTEVPVAIHADQLTPTWRVYSTGSNVFQTRAGCLIGAEHVNNSYECDIPIGAGICASYQTQTNSPSRAGSVASQSIIAYTMSLGAENSVAYSNNSIAIPTNFTISVTTEILPVSMTKTSVDCTMYICGDSTECSNLLLQYGSFCTQLNRALTGIAVEQDKNTQEVFAQVKQIYKTPPIKDFGGFNFSQILPDPSKPSKRSFIEDLLFNKVTLADAGFIKQYGDCLGDIAARDLICAQKFNGLTVLPPLLTDEMIAQYTSALLAGTITCGWTFGAGACLQIPFAMQMAYRFNGIGVTQNVLYENQKLIANQFNSAIGKIQDSLSSTASALGKLQDVVNQNAQALNTLVKQLSSNFGAISSVLNDILSRLDKVEAEVQIDRLITGRLQSLQTYVTQQLIRAAEIRASANLAATKMSECVLGQSKRVDFCGKGYHLMSFPQSAPHGVVFLHVTYVPAQEKNFTTAPAICHDGKAHFPREGVFVSNGTHWFVTQRNFYEPQIITTDNTFVSGNCDVVIGIVNNTVYDPLQPELDSFKEELDKYFKNHTSPDVDLGDISGINASVVNIQKEIDRLNEVAKNLNESLIDLQELGKYEQGSGYIPEAPRDGQAYVRKDGEWVLLSTFLGRSLEVLFQGPGSLPETGGGSDYKDDDDKGGGGSGGGGSGGGGSGGGGSGGGGSHHHHHH

SEQ ID NO: 69 - protein, 1297 aa, Artificial Sequence
  source: /note="Description of Artificial Sequence: Synthetic polypeptide"
MFVFLVLLPLVSSQCVNLTTRTQLPPAYTNSFTRGVYYPDKVFRSSVLHSTQDLFLPFFSNVTWFHAIHVSGTNGTKRFDNPVLPFNDGVYFASTEKSNIIRGWIFGTTLDSKTQSLLIVNNATNVVIKVCEFQFCNDPFLGVYYHKNNKSWMESEFRVYSSANNCTFEYVSQPFLMDLEGKQGNFKNLREFVFKNIDGYFKIYSKHTPINLVRDLPQGFSALEPLVDLPIGINITRFQTLLALHRSYLTPGDSSSGWTAGAAAYYVGYLQPRTFLLKYNENGTITDAVDCALDPLSETKCTLKSFTVEKGIYQTSNFRVQPTESIVRFPNITNLCPFGEVFNATRFASVYAWNRKRISNCVADYSVLYNSASFSTFKCYGVSPTKLNDLCFTNVYADSFVIRGDEVRQIAPGQTGKIADYNYKLPDDFTGCVIAWNSNNLDSKVGGNYNYLYRLFRKSNLKPFERDISTEIYQAGSTPCNGVEGFNCYFPLQSYGFQPTNGVGYQPYRVVVLSFELLHAPATVCGPKKSTNLVKNKCVNFNFNGLTGTGVLTESNKKFLPFQQFGRDIADITDAVRDPQTLEILDITPCSFGGVSVITPGTNTSNQVAVLYQNVNCTEVPVAIHADQLTPTWRVYSTGSNVFQTRAGCLIGAEHVNNSYECDIPIGAGICASYQTQTNSPSRAGSVASQSIIAYTMSLGAENSVAYSNNSIAIPTNFTISVTTEILPVSMTKTSVDCTMYICGDSTECSNLLLQYGSFCTQLNRALTGIAVEQDKNTQEVFAQVKQIYKTPPIKDFGGFNFSQILPDPSKPSKRSFIEDLLFNKVTLADAGFIKQYGDCLGDIAARDLICAQKFNGLTVLPPLLTDEMIAQYTSALLAGTITSGWTFGAGPALQIPFAMQMAYRFNGIGVTQNVLYENQKLIANQFNSAIGKIQDSLSSTPSALGKLQDVVNQNAQALNTLVKQLSSNFGAISSVLNDILSRLDKVEAEVQIDRLITGRLQSLQTYVTQQLIRAAEIRASANLAATKMSECVLGQSKRVDFCGKGYHLMSFPQSAPHGVVFLHVTYVPAQEKNFTTAPAICHDGKAHFPREGVFVSNGTHWFVTQRNFYEPQIITTDNTFVSGNCDVVIGIVNNTVYDPLQPELDSFKEELDKYFKNHTSPDVDLGDISGINASVVNIQKEIDRLNEVAKNLNESLIDLQELGKYEQGSGYIPEAPRDGQAYVRKDGEWVLLSTFLGRSLEVLFQGPGSLPETGGGSDYKDDDDKGGGGSGGGGSGGGGSGGGGSGGGGSHHHHHH

SEQ ID NO: 70 - protein, 1297 aa, Artificial Sequence
  source: /note="Description of Artificial Sequence: Synthetic polypeptide"
MFVFLVLLPLVSSQCVNLTTRTQLPPAYTNSFTRGVYYPDKVFRSSVLHSTQDLFLPFFSNVTWFHAIHVSGTNGTKRFDNPVLPFNDGVYFASTEKSNIIRGWIFGTTLDSKTQSLLIVNNATNVVIKVCEFQFCNDPFLGVYYHKNNKSWMESEFRVYSSANNCTFEYVSQPFLMDLEGKQGNFKNLREFVFKNIDGYFKIYSKHTPINLVRDLPQGFSALEPLVDLPIGINITRFQTLLALHRSYLTPGDSSSGWTAGAAAYYVGYLQPRTFLLKYNENGTITDAVDCALDPLSETKCTLKSFTVEKGIYQTSNFRVQPTESIVRFPNITNLCPFGEVFNATRFASVYAWNRKRISNCVADYSVLYNSASFSTFKCYGVSPTKLNDLCFTNVYADSFVIRGDEVRQIAPGQTGKIADYNYKLPDDFTGCVIAWNSNNLDSKVGGNYNYLYRLFRKSNLKPFERDISTEIYQAGSTPCNGVEGFNCYFPLQSYGFQPTNGVGYQPYRVVVLSFELLHAPATVCGPKKSTPLVKNKCVNFNFNGLTGTGVLTESNKKFLPFQQFGRDIADTTDAVRDPQTLEILDITPCSFGGVSVITPGTNTSNQVAVLYQNVNCTEVPVAIHADQLTPTWRVYSTGSNVFQTRAGCLIGAEHVNNSYECDIPIGAGICASYQTQTNSPSRAGSVASQSIIAYTMSLGAENSVAYSNNSIAIPTNFTISVTTEILPVSMTKTSVDCTMYICGDSTECSNLLLQYGSFCTQLNRALTGIAVEQDKNTQEVFAQVKQIYKTPPIKDFGGFNFSQILPDPSKPSKRSFIEDLLFNKVTLADAGFIKQYGDCLGDIAARDLICAQKFNGLTVLPPLLTDEMIAQYTSALLAGTITSGWTFGAGPALQIPFAMQMAYRFNGIGVTQNVLYENQKLIANQFNSAIGKIQDSLSSTPSALGKLQDVVNQNAQALNTLVKQLSSNFGAISSVLNDILSRLDKVEAEVQIDRLITGRLQSLQTYVTQQLIRAAEIRASANLAATKMSECVLGQSKRVDFCGKGYHLMSFPQSAPHGVVFLHVTYVPAQEKNFTTAPAICHDGKAHFPREGVFVSNGTHWFVTQRNFYEPQIITTDNTFVSGNCDVVIGIVNNTVYDPLQPELDSFKEELDKYFKNHTSPDVDLGDISGINASVVNIQKEIDRLNEVAKNLNESLIDLQELGKYEQGSGYIPEAPRDGQAYVRKDGEWVLLSTFLGRSLEVLFQGPGSLPETGGGSDYKDDDDKGGGGSGGGGSGGGGSGGGGSGGGGSHHHHHH

SEQ ID NO: 71 - protein, 1297 aa, Artificial Sequence
  source: /note="Description of Artificial Sequence: Synthetic polypeptide"
MFVFLVLLPLVSSQCVNLTTRTQLPPAYTNSFTRGVYYPDKVFRSSVLHSTQDLFLPFFSNVTWFHAIHVSGTNGTKRFDNPVLPFNDGVYFASTEKSNIIRGWIFGTTLDSKTQSLLIVNNATNVVIKVCEFQFCNDPFLGVYYHKNNKSWMESEFRVYSSANNCTFEYVSQPFLMDLEGKQGNFKNLREFVFKNIDGYFKIYSKHTPINLVRDLPQGFSALEPLVDLPIGINITRFQTLLALHRSYLTPGDSSSGWTAGAAAYYVGYLQPRTFLLKYNENGTITDAVDCALDPLSETKCTLKSFTVEKGIYQTSNFRVQPTESIVRFPNITNLCPFGEVFNATRFASVYAWNRKRISNCVADYSVLYNSASFSTFKCYGVSPTKLNDLCFTNVYADSFVIRGDEVRQIAPGQTGKIADYNYKLPDDFTGCVIAWNSNNLDSKVGGNYNYLYRLFRKSNLKPFERDISTEIYQAGSTPCNGVEGFNCYFPLQSYGFQPTNGVGYQPYRVVVLSFELLHAPATVCGPKKSTNLVKNKCVNFNFNGLTGTGVLTESNKKFLPFQQFGRDIADTTDAVRDPQTLEILDITPCSFGGVSVITPGTNTSNQVAVLYQNVNCTEVPVAIHADQLTPTWRVYSTGSNVFQTRAGCLIGAEHVNNSYECDIPIGAGICASYQTQTNSPSRAGSVASQSIIAYTMSLGAENSVAYSNNSIAIPTNFTISVTTEILPVSMTKTSVDCTMYICGDSTECSNLLLQYGSFCTQLNRALTGIAVEQDKNTQEVFAQVKQIYKTPPIKDFGGFNFSQILPDPSKPSKRSFIEDLLFNKVTLADAGFIKQYGDCLGDIAARDLICAQKFNGLTVLPPLLTDEMIAQYTSALLACTITSGWTCGAGPALQIPFAMQMAYRFNGIGVTQNVLYENQKLIANQFNSAIGKIQDSLSSTPSALGKLQDVVNQNAQALNTLVKQLSSNFGAISSVLNDILSRLDKVEAEVQIDRLITGRLQSLQTYVTQQLIRAAEIRASANLAATKMSECVLGQSKRVDFCGKGYHLMSFPQSAPHGVVFLHVTYVPAQEKNFTTAPAICHDGKAHFPREGVFVSNGTHWFVTQRNFYEPQIITTDNTFVSGNCDVVIGIVNNTVYDPLQPELDSFKEELDKYFKNHTSPDVDLGDISGINASVVNIQKEIDRLNEVAKNLNESLIDLQELGKYEQGSGYIPEAPRDGQAYVRKDGEWVLLSTFLGRSLEVLFQGPGSLPETGGGSDYKDDDDKGGGGSGGGGSGGGGSGGGGSGGGGSHHHHHH

SEQ ID NO: 72 - protein, 1297 aa, Artificial Sequence
  source: /note="Description of Artificial Sequence: Synthetic polypeptide"
MFVFLVLLPLVSSQCVNLTTRTQLPPAYTNSFTRGVYYPDKVFRSSVLHSTQDLFLPFFSNVTWFHAIHVSGTNGTKRFDNPVLPFNDGVYFASTEKSNIIRGWIFGTTLDSKTQSLLIVNNATNVVIKVCEFQFCNDPFLGVYYHKNNKSWMESEFRVYSSANNCTFEYVSQPFLMDLEGKQGNFKNLREFVFKNIDGYFKIYSKHTPINLVRDLPQGFSALEPLVDLPIGINITRFQTLLALHRSYLTPGDSSSGWTAGAAAYYVGYLQPRTFLLKYNENGTITDAVDCALDPLSETKCTLKSFTVEKGIYQTSNFRVQPTESIVRFPNITNLCPFGEVFNATRFASVYAWNRKRISNCVADYSVLYNSASFSTFKCYGVSPTKLNDLCFTNVYADSFVIRGDEVRQIAPGQTGKIADYNYKLPDDFTGCVIAWNSNNLDSKVGGNYNYLYRLFRKSNLKPFERDISTEIYQAGSTPCNGVEGFNCYFPLQSYGFQPTNGVGYQPYRVVVLSFELLHAPATVCGPKKSTNLVKNKCVNFNFNGLTGTGVLTESNKKFLPFQQFGRDIADTTDAVRDPQTLEILDITPCSFGGVSVITPGTNTSNQVAVLYQNVNCTEVPVAIHADQLTPTWRVYSTGSNVFQTRAGCLIGAEHVNNSYECDIPIGAGICASYQTQTNSPSRAGSVASQSIIAYTMSLGAENSVAYSNNSIAIPTNFTISVTTEILPVSMTKTSVDCTMYICGDSTECSNLLLQYGSFCTQLNRALTGIAVEQDKNTQEVFAQVKQIYKTPPIKDFGGFNFSQILPDPSKPSKRSFIEDLLFNKVTLADAGFIKQYGDCLGDIAARDLICAQKFNGLTVLPPLLTDEMIAQYTSALLAGTITCGWTFGAGPCLQIPFAMQMAYRFNGIGVTQNVLYENQKLIANQFNSAIGKIQDSLSSTPSALGKLQDVVNQNAQALNTLVKQLSSNFGAISSVLNDILSRLDKVEAEVQIDRLITGRLQSLQTYVTQQLIRAAEIRASANLAATKMSECVLGQSKRVDFCGKGYHLMSFPQSAPHGVVFLHVTYVPAQEKNFTTAPAICHDGKAHFPREGVFVSNGTHWFVTQRNFYEPQIITTDNTFVSGNCDVVIGIVNNTVYDPLQPELDSFKEELDKYFKNHTSPDVDLGDISGINASVVNIQKEIDRLNEVAKNLNESLIDLQELGKYEQGSGYIPEAPRDGQAYVRKDGEWVLLSTFLGRSLEVLFQGPGSLPETGGGSDYKDDDDKGGGGSGGGGSGGGGSGGGGSGGGGSHHHHHH

SEQ ID NO: 73 - protein, 1297 aa, Artificial Sequence
  source: /note="Description of Artificial Sequence: Synthetic polypeptide"
MFVFLVLLPLVSSQCVNLTTRTQLPPAYTNSFTRGVYYPDKVFRSSVLHSTQDLFLPFFSNVTWFHAIHVSGTNGTKRFDNPVLPFNDGVYFASTEKSNIIRGWIFGTTLDSKTQSLLIVNNATNVVIKVCEFQFCNDPFLGVYYHKNNKSWMESEFRVYSSANNCTFEYVSQPFLMDLEGKQGNFKNLREFVFKNIDGYFKIYSKHTPINLVRDLPQGFSALEPLVDLPIGINITRFQTLLALHRSYLTPGDSSSGWTAGAAAYYVGYLQPRTFLLKYNENGTITDAVDCALDPLSETKCTLKSFTVEKGIYQTSNFRVQPTESIVRFPNITNLCPFGEVFNATRFASVYAWNRKRISNCVADYSVLYNSASFSTFKCYGVSPTKLNDLCFTNVYADSFVIRGDEVRQIAPGQTGKIADYNYKLPDDFTGCVIAWNSNNLDSKVGGNYNYLYRLFRKSNLKPFERDISTEIYQAGSTPCNGVEGFNCYFPLQSYGFQPTNGVGYQPYRVVVLSFELLHAPATVCGPKKSTPLVKNKCVNFNFNGLTGTGVLTESNKKFLPFQQFGRDIADITDAVRDPQTLEILDITPCSFGGVSVITPGTNTSNQVAVLYQDVNCTEVPVAIHADQLTPTWRVYSTGSNVFQTRAGCLIGAEHVNNSYECDIPIGAGICASYQTQTNSPSRAGSVASQSIIAYTMSLGAENSVAYSNNSIAIPTNFTISVTTEILPVSMTKTSVDCTMYICGDSTECSNLLLQYGSFCTQLNRALTGIAVEQDKNTQEVFAQVKQIYKTPPIKDFGGFNFSQILPDPSKPSKRSFIEDLLFNKVTLADAGFIKQYGDCLGDIAARDLICAQKFNGLTVLPPLLTDEMIAQYTSALLAGTITSGWTFGAGPALQIPFAMQMAYRFNGIGVTQNVLYENQKLIANQFNSAIGKIQDSLSSTPSALGKLQDVVNQNAQALNTLVKQLSSNFGAISSVLNDILSRLDKVEAEVQIDRLITGRLQSLQTYVTQQLIRAAEIRASANLAATKMSECVLGQSKRVDFCGKGYHLMSFPQSAPHGVVFLHVTYVPAQEKNFTTAPAICHDGKAHFPREGVFVSNGTHWFVTQRNFYEPQIITTDNTFVSGNCDVVIGIVNNTVYDPLQPELDSFKEELDKYFKNHTSPDVDLGDISGINASVVNIQKEIDRLNEVAKNLNESLIDLQELGKYEQGSGYIPEAPRDGQAYVRKDGEWVLLSTFLGRSLEVLFQGPGSLPETGGGSDYKDDDDKGGGGSGGGGSGGGGSGGGGSGGGGSHHHHHH

SEQ ID NO: 74 - protein, 1297 aa, Artificial Sequence
  source: /note="Description of Artificial Sequence: Synthetic polypeptide"
MFVFLVLLPLVSSQCVNLTTRTQLPPAYTNSFTRGVYYPDKVFRSSVLHSTQDLFLPFFSNVTWFHAIHVSGTNGTKRFDNPVLPFNDGVYFASTEKSNIIRGWIFGTTLDSKTQSLLIVNNATNVVIKVCEFQFCNDPFLGVYYHKNNKSWMESEFRVYSSANNCTFEYVSQPFLMDLEGKQGNFKNLREFVFKNIDGYFKIYSKHTPINLVRDLPQGFSALEPLVDLPIGINITRFQTLLALHRSYLTPGDSSSGWTAGAAAYYVGYLQPRTFLLKYNENGTITDAVDCALDPLSETKCTLKSFTVEKGIYQTSNFRVQPTESIVRFPNITNLCPFGEVFNATRFASVYAWNRKRISNCVADYSVLYNSASFSTFKCYGVSPTKLNDLCFTNVYADSFVIRGDEVRQIAPGQTGKIADYNYKLPDDFTGCVIAWNSNNLDSKVGGNYNYLYRLFRKSNLKPFERDISTEIYQAGSTPCNGVEGFNCYFPLQSYGFQPTNGVGYQPYRVVVLSFELLHAPATVCGPKKSTNLVKNKCVNFNFNGLTGTGVLTESNKKFLPFQQFGRDIADITDAVRDPQTLEILDITPCSFGGVSVITPGTNTSNQVAVLYQDVNCTEVPVAIHADQLTPTWRVYSTGSNVFQTRAGCLIGAEHVNNSYECDIPIGAGICASYQTQTNSPSRAGSVASQSIIAYTMSLGAENSVAYSNNSIAIPTNFTISVTTEILPVSMTKTSVDCTMYICGDSTECSNLLLQYGSFCTQLNRALTGIAVEQDKNTQEVFAQVKQIYKTPPIKDFGGFNFSQILPDPSKPSKRSFIEDLLFNKVTLADAGFIKQYGDCLGDIAARDLICAQKFNGLTVLPPLLTDEMIAQYTSALLACTITSGWTCGAGPALQIPFAMQMAYRFNGIGVTQNVLYENQKLIANQFNSAIGKIQDSLSSTPSALGKLQDVVNQNAQALNTLVKQLSSNFGAISSVLNDILSRLDKVEAEVQIDRLITGRLQSLQTYVTQQLIRAAEIRASANLAATKMSECVLGQSKRVDFCGKGYHLMSFPQSAPHGVVFLHVTYVPAQEKNFTTAPAICHDGKAHFPREGVFVSNGTHWFVTQRNFYEPQIITTDNTFVSGNCDVVIGIVNNTVYDPLQPELDSFKEELDKYFKNHTSPDVDLGDISGINASVVNIQKEIDRLNEVAKNLNESLIDLQELGKYEQGSGYIPEAPRDGQAYVRKDGEWVLLSTFLGRSLEVLFQGPGSLPETGGGSDYKDDDDKGGGGSGGGGSGGGGSGGGGSGGGGSHHHHHH

SEQ ID NO: 75 - protein, 1297 aa, Artificial Sequence
  source: /note="Description of Artificial Sequence: Synthetic polypeptide"
MFVFLVLLPLVSSQCVNLTTRTQLPPAYTNSFTRGVYYPDKVFRSSVLHSTQDLFLPFFSNVTWFHAIHVSGTNGTKRFDNPVLPFNDGVYFASTEKSNIIRGWIFGTTLDSKTQSLLIVNNATNVVIKVCEFQFCNDPFLGVYYHKNNKSWMESEFRVYSSANNCTFEYVSQPFLMDLEGKQGNFKNLREFVFKNIDGYFKIYSKHTPINLVRDLPQGFSALEPLVDLPIGINITRFQTLLALHRSYLTPGDSSSGWTAGAAAYYVGYLQPRTFLLKYNENGTITDAVDCALDPLSETKCTLKSFTVEKGIYQTSNFRVQPTESIVRFPNITNLCPFGEVFNATRFASVYAWNRKRISNCVADYSVLYNSASFSTFKCYGVSPTKLNDLCFTNVYADSFVIRGDEVRQIAPGQTGKIADYNYKLPDDFTGCVIAWNSNNLDSKVGGNYNYLYRLFRKSNLKPFERDISTEIYQAGSTPCNGVEGFNCYFPLQSYGFQPTNGVGYQPYRVVVLSFELLHAPATVCGPKKSTNLVKNKCVNFNFNGLTGTGVLTESNKKFLPFQQFGRDIADITDAVRDPQTLEILDITPCSFGGVSVITPGTNTSNQVAVLYQDVNCTEVPVAIHADQLTPTWRVYSTGSNVFQTRAGCLIGAEHVNNSYECDIPIGAGICASYQTQTNSPSRAGSVASQSIIAYTMSLGAENSVAYSNNSIAIPTNFTISVTTEILPVSMTKTSVDCTMYICGDSTECSNLLLQYGSFCTQLNRALTGIAVEQDKNTQEVFAQVKQIYKTPPIKDFGGFNFSQILPDPSKPSKRSFIEDLLFNKVTLADAGFIKQYGDCLGDIAARDLICAQKFNGLTVLPPLLTDEMIAQYTSALLAGTITCGWTFGAGPCLQIPFAMQMAYRFNGIGVTQNVLYENQKLIANQFNSAIGKIQDSLSSTPSALGKLQDVVNQNAQALNTLVKQLSSNFGAISSVLNDILSRLDKVEAEVQIDRLITGRLQSLQTYVTQQLIRAAEIRASANLAATKMSECVLGQSKRVDFCGKGYHLMSFPQSAPHGVVFLHVTYVPAQEKNFTTAPAICHDGKAHFPREGVFVSNGTHWFVTQRNFYEPQIITTDNTFVSGNCDVVIGIVNNTVYDPLQPELDSFKEELDKYFKNHTSPDVDLGDISGINASVVNIQKEIDRLNEVAKNLNESLIDLQELGKYEQGSGYIPEAPRDGQAYVRKDGEWVLLSTFLGRSLEVLFQGPGSLPETGGGSDYKDDDDKGGGGSGGGGSGGGGSGGGGSGGGGSHHHHHH

SEQ ID NO: 76 - protein, 1297 aa, Artificial Sequence
  source: /note="Description of Artificial Sequence: Synthetic polypeptide"
MFVFLVLLPLVSSQCVNLTTRTQLPPAYTNSFTRGVYYPDKVFRSSVLHSTQDLFLPFFSNVTWFHAIHVSGTNGTKRFDNPVLPFNDGVYFASTEKSNIIRGWIFGTTLDSKTQSLLIVNNATNVVIKVCEFQFCNDPFLGVYYHKNNKSWMESEFRVYSSANNCTFEYVSQPFLMDLEGKQGNFKNLREFVFKNIDGYFKIYSKHTPINLVRDLPQGFSALEPLVDLPIGINITRFQTLLALHRSYLTPGDSSSGWTAGAAAYYVGYLQPRTFLLKYNENGTITDAVDCALDPLSETKCTLKSFTVEKGIYQTSNFRVQPTESIVRFPNITNLCPFGEVFNATRFASVYAWNRKRISNCVADYSVLYNSASFSTFKCYGVSPTKLNDLCFTNVYADSFVIRGDEVRQIAPGQTGKIADYNYKLPDDFTGCVIAWNSNNLDSKVGGNYNYLYRLFRKSNLKPFERDISTEIYQAGSTPCNGVEGFNCYFPLQSYGFQPTNGVGYQPYRVVVLSFELLHAPATVCGPKKSTPLVKNKCVNFNFNGLTGTGVLTESNKKFLPFQQFGRDIADTTDAVRDPQTLEILDITPCSFGGVSVITPGTNTSNQVAVLYQDVNCTEVPVAIHADQLTPTWRVYSTGSNVFQTRAGCLIGAEHVNNSYECDIPIGAGICASYQTQTNSPSRAGSVASQSIIAYTMSLGAENSVAYSNNSIAIPTNFTISVTTEILPVSMTKTSVDCTMYICGDSTECSNLLLQYGSFCTQLNRALTGIAVEQDKNTQEVFAQVKQIYKTPPIKDFGGFNFSQILPDPSKPSKRSFIEDLLFNKVTLADAGFIKQYGDCLGDIAARDLICAQKFNGLTVLPPLLTDEMIAQYTSALLACTITSGWTCGAGPALQIPFAMQMAYRFNGIGVTQNVLYENQKLIANQFNSAIGKIQDSLSSTPSALGKLQDVVNQNAQALNTLVKQLSSNFGAISSVLNDILSRLDKVEAEVQIDRLITGRLQSLQTYVTQQLIRAAEIRASANLAATKMSECVLGQSKRVDFCGKGYHLMSFPQSAPHGVVFLHVTYVPAQEKNFTTAPAICHDGKAHFPREGVFVSNGTHWFVTQRNFYEPQIITTDNTFVSGNCDVVIGIVNNTVYDPLQPELDSFKEELDKYFKNHTSPDVDLGDISGINASVVNIQKEIDRLNEVAKNLNESLIDLQELGKYEQGSGYIPEAPRDGQAYVRKDGEWVLLSTFLGRSLEVLFQGPGSLPETGGGSDYKDDDDKGGGGSGGGGSGGGGSGGGGSGGGGSHHHHHH

SEQ ID NO: 77 - protein, 1297 aa, Artificial Sequence
  source: /note="Description of Artificial Sequence: Synthetic polypeptide"
MFVFLVLLPLVSSQCVNLTTRTQLPPAYTNSFTRGVYYPDKVFRSSVLHSTQDLFLPFFSNVTWFHAIHVSGTNGTKRFDNPVLPFNDGVYFASTEKSNIIRGWIFGTTLDSKTQSLLIVNNATNVVIKVCEFQFCNDPFLGVYYHKNNKSWMESEFRVYSSANNCTFEYVSQPFLMDLEGKQGNFKNLREFVFKNIDGYFKIYSKHTPINLVRDLPQGFSALEPLVDLPIGINITRFQTLLALHRSYLTPGDSSSGWTAGAAAYYVGYLQPRTFLLKYNENGTITDAVDCALDPLSETKCTLKSFTVEKGIYQTSNFRVQPTESIVRFPNITNLCPFGEVFNATRFASVYAWNRKRISNCVADYSVLYNSASFSTFKCYGVSPTKLNDLCFTNVYADSFVIRGDEVRQIAPGQTGKIADYNYKLPDDFTGCVIAWNSNNLDSKVGGNYNYLYRLFRKSNLKPFERDISTEIYQAGSTPCNGVEGFNCYFPLQSYGFQPTNGVGYQPYRVVVLSFELLHAPATVCGPKKSTPLVKNKCVNFNFNGLTGTGVLTESNKKFLPFQQFGRDIADTTDAVRDPQTLEILDITPCSFGGVSVITPGTNTSNQVAVLYQDVNCTEVPVAIHADQLTPTWRVYSTGSNVFQTRAGCLIGAEHVNNSYECDIPIGAGICASYQTQTNSPSRAGSVASQSIIAYTMSLGAENSVAYSNNSIAIPTNFTISVTTEILPVSMTKTSVDCTMYICGDSTECSNLLLQYGSFCTQLNRALTGIAVEQDKNTQEVFAQVKQIYKTPPIKDFGGFNFSQILPDPSKPSKRSFIEDLLFNKVTLADAGFIKQYGDCLGDIAARDLICAQKFNGLTVLPPLLTDEMIAQYTSALLAGTITCGWTFGAGPCLQIPFAMQMAYRFNGIGVTQNVLYENQKLIANQFNSAIGKIQDSLSSTPSALGKLQDVVNQNAQALNTLVKQLSSNFGAISSVLNDILSRLDKVEAEVQIDRLITGRLQSLQTYVTQQLIRAAEIRASANLAATKMSECVLGQSKRVDFCGKGYHLMSFPQSAPHGVVFLHVTYVPAQEKNFTTAPAICHDGKAHFPREGVFVSNGTHWFVTQRNFYEPQIITTDNTFVSGNCDVVIGIVNNTVYDPLQPELDSFKEELDKYFKNHTSPDVDLGDISGINASVVNIQKEIDRLNEVAKNLNESLIDLQELGKYEQGSGYIPEAPRDGQAYVRKDGEWVLLSTFLGRSLEVLFQGPGSLPETGGGSDYKDDDDKGGGGSGGGGSGGGGSGGGGSGGGGSHHHHHH

SEQ ID NO: 78 - protein, 1297 aa, Artificial Sequence
  source: /note="Description of Artificial Sequence: Synthetic polypeptide"
MFVFLVLLPLVSSQCVNLTTRTQLPPAYTNSFTRGVYYPDKVFRSSVLHSTQDLFLPFFSNVTWFHAIHVSGTNGTKRFDNPVLPFNDGVYFASTEKSNIIRGWIFGTTLDSKTQSLLIVNNATNVVIKVCEFQFCNDPFLGVYYHKNNKSWMESEFRVYSSANNCTFEYVSQPFLMDLEGKQGNFKNLREFVFKNIDGYFKIYSKHTPINLVRDLPQGFSALEPLVDLPIGINITRFQTLLALHRSYLTPGDSSSGWTAGAAAYYVGYLQPRTFLLKYNENGTITDAVDCALDPLSETKCTLKSFTVEKGIYQTSNFRVQPTESIVRFPNITNLCPFGEVFNATRFASVYAWNRKRISNCVADYSVLYNSASFSTFKCYGVSPTKLNDLCFTNVYADSFVIRGDEVRQIAPGQTGKIADYNYKLPDDFTGCVIAWNSNNLDSKVGGNYNYLYRLFRKSNLKPFERDISTEIYQAGSTPCNGVEGFNCYFPLQSYGFQPTNGVGYQPYRVVVLSFELLHAPATVCGPKKSTPLVKNKCVNFNFNGLTGTGVLTESNKKFLPFQQFGRDIADITDAVRDPQTLEILDITPCSFGGVSVITPGTNTSNQVAVLYQNVNCTEVPVAIHADQLTPTWRVYSTGSNVFQTRAGCLIGAEHVNNSYECDIPIGAGICASYQTQTNSPSRAGSVASQSIIAYTMSLGAENSVAYSNNSIAIPTNFTISVTTEILPVSMTKTSVDCTMYICGDSTECSNLLLQYGSFCTQLNRALTGIAVEQDKNTQEVFAQVKQIYKTPPIKDFGGFNFSQILPDPSKPSKRSFIEDLLFNKVTLADAGFIKQYGDCLGDIAARDLICAQKFNGLTVLPPLLTDEMIAQYTSALLAGTITSGWTFGAGAALQIPFAMQMAYRFNGIGVTQNVLYENQKLIANQFNSAIGKIQDSLSSTPSALGKLQDVVNQNAQALNTLVKQLSSNFGAISSVLNDILSRLDKVEAEVQIDRLITGRLQSLQTYVTQQLIRAAEIRASANLAATKMSECVLGQSKRVDFCGKGYHLMSFPQSAPHGVVFLHVTYVPAQEKNFTTAPAICHDGKAHFPREGVFVSNGTHWFVTQRNFYEPQIITTDNTFVSGNCDVVIGIVNNTVYDPLQPELDSFKEELDKYFKNHTSPDVDLGDISGINASVVNIQKEIDRLNEVAKNLNESLIDLQELGKYEQGSGYIPEAPRDGQAYVRKDGEWVLLSTFLGRSLEVLFQGPGSLPETGGGSDYKDDDDKGGGGSGGGGSGGGGSGGGGSGGGGSHHHHHH

SEQ ID NO: 79 - protein, 1297 aa, Artificial Sequence
  source: /note="Description of Artificial Sequence: Synthetic polypeptide"
MFVFLVLLPLVSSQCVNLTTRTQLPPAYTNSFTRGVYYPDKVFRSSVLHSTQDLFLPFFSNVTWFHAIHVSGTNGTKRFDNPVLPFNDGVYFASTEKSNIIRGWIFGTTLDSKTQSLLIVNNATNVVIKVCEFQFCNDPFLGVYYHKNNKSWMESEFRVYSSANNCTFEYVSQPFLMDLEGKQGNFKNLREFVFKNIDGYFKIYSKHTPINLVRDLPQGFSALEPLVDLPIGINITRFQTLLALHRSYLTPGDSSSGWTAGAAAYYVGYLQPRTFLLKYNENGTITDAVDCALDPLSETKCTLKSFTVEKGIYQTSNFRVQPTESIVRFPNITNLCPFGEVFNATRFASVYAWNRKRISNCVADYSVLYNSASFSTFKCYGVSPTKLNDLCFTNVYADSFVIRGDEVRQIAPGQTGKIADYNYKLPDDFTGCVIAWNSNNLDSKVGGNYNYLYRLFRKSNLKPFERDISTEIYQAGSTPCNGVEGFNCYFPLQSYGFQPTNGVGYQPYRVVVLSFELLHAPATVCGPKKSTNLVKNKCVNFNFNGLTGTGVLTESNKKFLPFQQFGRDIADITDAVRDPQTLEILDITPCSFGGVSVITPGTNTSNQVAVLYQNVNCTEVPVAIHADQLTPTWRVYSTGSNVFQTRAGCLIGAEHVNNSYECDIPIGAGICASYQTQTNSPSRAGSVASQSIIAYTMSLGAENSVAYSNNSIAIPTNFTISVTTEILPVSMTKTSVDCTMYICGDSTECSNLLLQYGSFCTQLNRALTGIAVEQDKNTQEVFAQVKQIYKTPPIKDFGGFNFSQILPDPSKPSKRSFIEDLLFNKVTLADAGFIKQYGDCLGDIAARDLICAQKFNGLTVLPPLLTDEMIAQYTSALLACTITSGWTCGAGAALQIPFAMQMAYRFNGIGVTQNVLYENQKLIANQFNSAIGKIQDSLSSTPSALGKLQDVVNQNAQALNTLVKQLSSNFGAISSVLNDILSRLDKVEAEVQIDRLITGRLQSLQTYVTQQLIRAAEIRASANLAATKMSECVLGQSKRVDFCGKGYHLMSFPQSAPHGVVFLHVTYVPAQEKNFTTAPAICHDGKAHFPREGVFVSNGTHWFVTQRNFYEPQIITTDNTFVSGNCDVVIGIVNNTVYDPLQPELDSFKEELDKYFKNHTSPDVDLGDISGINASVVNIQKEIDRLNEVAKNLNESLIDLQELGKYEQGSGYIPEAPRDGQAYVRKDGEWVLLSTFLGRSLEVLFQGPGSLPETGGGSDYKDDDDKGGGGSGGGGSGGGGSGGGGSGGGGSHHHHHH

SEQ ID NO: 80 - protein, 1297 aa, Artificial Sequence
  source: /note="Description of Artificial Sequence: Synthetic polypeptide"
MFVFLVLLPLVSSQCVNLTTRTQLPPAYTNSFTRGVYYPDKVFRSSVLHSTQDLFLPFFSNVTWFHAIHVSGTNGTKRFDNPVLPFNDGVYFASTEKSNIIRGWIFGTTLDSKTQSLLIVNNATNVVIKVCEFQFCNDPFLGVYYHKNNKSWMESEFRVYSSANNCTFEYVSQPFLMDLEGKQGNFKNLREFVFKNIDGYFKIYSKHTPINLVRDLPQGFSALEPLVDLPIGINITRFQTLLALHRSYLTPGDSSSGWTAGAAAYYVGYLQPRTFLLKYNENGTITDAVDCALDPLSETKCTLKSFTVEKGIYQTSNFRVQPTESIVRFPNITNLCPFGEVFNATRFASVYAWNRKRISNCVADYSVLYNSASFSTFKCYGVSPTKLNDLCFTNVYADSFVIRGDEVRQIAPGQTGKIADYNYKLPDDFTGCVIAWNSNNLDSKVGGNYNYLYRLFRKSNLKPFERDISTEIYQAGSTPCNGVEGFNCYFPLQSYGFQPTNGVGYQPYRVVVLSFELLHAPATVCGPKKSTNLVKNKCVNFNFNGLTGTGVLTESNKKFLPFQQFGRDIADITDAVRDPQTLEILDITPCSFGGVSVITPGTNTSNQVAVLYQNVNCTEVPVAIHADQLTPTWRVYSTGSNVFQTRAGCLIGAEHVNNSYECDIPIGAGICASYQTQTNSPSRAGSVASQSIIAYTMSLGAENSVAYSNNSIAIPTNFTISVTTEILPVSMTKTSVDCTMYICGDSTECSNLLLQYGSFCTQLNRALTGIAVEQDKNTQEVFAQVKQIYKTPPIKDFGGFNFSQILPDPSKPSKRSFIEDLLFNKVTLADAGFIKQYGDCLGDIAARDLICAQKFNGLTVLPPLLTDEMIAQYTSALLAGTITCGWTFGAGACLQIPFAMQMAYRFNGIGVTQNVLYENQKLIANQFNSAIGKIQDSLSSTPSALGKLQDVVNQNAQALNTLVKQLSSNFGAISSVLNDILSRLDKVEAEVQIDRLITGRLQSLQTYVTQQLIRAAEIRASANLAATKMSECVLGQSKRVDFCGKGYHLMSFPQSAPHGVVFLHVTYVPAQEKNFTTAPAICHDGKAHFPREGVFVSNGTHWFVTQRNFYEPQIITTDNTFVSGNCDVVIGIVNNTVYDPLQPELDSFKEELDKYFKNHTSPDVDLGDISGINASVVNIQKEIDRLNEVAKNLNESLIDLQELGKYEQGSGYIPEAPRDGQAYVRKDGEWVLLSTFLGRSLEVLFQGPGSLPETGGGSDYKDDDDKGGGGSGGGGSGGGGSGGGGSGGGGSHHHHHH

SEQ ID NO: 81 - protein, 1297 aa, Artificial Sequence
  source: /note="Description of Artificial Sequence: Synthetic polypeptide"
MFVFLVLLPLVSSQCVNLTTRTQLPPAYTNSFTRGVYYPDKVFRSSVLHSTQDLFLPFFSNVTWFHAIHVSGTNGTKRFDNPVLPFNDGVYFASTEKSNIIRGWIFGTTLDSKTQSLLIVNNATNVVIKVCEFQFCNDPFLGVYYHKNNKSWMESEFRVYSSANNCTFEYVSQPFLMDLEGKQGNFKNLREFVFKNIDGYFKIYSKHTPINLVRDLPQGFSALEPLVDLPIGINITRFQTLLALHRSYLTPGDSSSGWTAGAAAYYVGYLQPRTFLLKYNENGTITDAVDCALDPLSETKCTLKSFTVEKGIYQTSNFRVQPTESIVRFPNITNLCPFGEVFNATRFASVYAWNRKRISNCVADYSVLYNSASFSTFKCYGVSPTKLNDLCFTNVYADSFVIRGDEVRQIAPGQTGKIADYNYKLPDDFTGCVIAWNSNNLDSKVGGNYNYLYRLFRKSNLKPFERDISTEIYQAGSTPCNGVEGFNCYFPLQSYGFQPTNGVGYQPYRVVVLSFELLHAPATVCGPKKSTPLVKNKCVNFNFNGLTGTGVLTESNKKFLPFQQFGRDIADTTDAVRDPQTLEILDITPCSFGGVSVITPGTNTSNQVAVLYQNVNCTEVPVAIHADQLTPTWRVYSTGSNVFQTRAGCLIGAEHVNNSYECDIPIGAGICASYQTQTNSPSRAGSVASQSIIAYTMSLGAENSVAYSNNSIAIPTNFTISVTTEILPVSMTKTSVDCTMYICGDSTECSNLLLQYGSFCTQLNRALTGIAVEQDKNTQEVFAQVKQIYKTPPIKDFGGFNFSQILPDPSKPSKRSFIEDLLFNKVTLADAGFIKQYGDCLGDIAARDLICAQKFNGLTVLPPLLTDEMIAQYTSALLACTITSGWTCGAGAALQIPFAMQMAYRFNGIGVTQNVLYENQKLIANQFNSAIGKIQDSLSSTPSALGKLQDVVNQNAQALNTLVKQLSSNFGAISSVLNDILSRLDKVEAEVQIDRLITGRLQSLQTYVTQQLIRAAEIRASANLAATKMSECVLGQSKRVDFCGKGYHLMSFPQSAPHGVVFLHVTYVPAQEKNFTTAPAICHDGKAHFPREGVFVSNGTHWFVTQRNFYEPQIITTDNTFVSGNCDVVIGIVNNTVYDPLQPELDSFKEELDKYFKNHTSPDVDLGDISGINASVVNIQKEIDRLNEVAKNLNESLIDLQELGKYEQGSGYIPEAPRDGQAYVRKDGEWVLLSTFLGRSLEVLFQGPGSLPETGGGSDYKDDDDKGGGGSGGGGSGGGGSGGGGSGGGGSHHHHHH

SEQ ID NO: 82 - protein, 1297 aa, Artificial Sequence
  source: /note="Description of Artificial Sequence: Synthetic polypeptide"
MFVFLVLLPLVSSQCVNLTTRTQLPPAYTNSFTRGVYYPDKVFRSSVLHSTQDLFLPFFSNVTWFHAIHVSGTNGTKRFDNPVLPFNDGVYFASTEKSNIIRGWIFGTTLDSKTQSLLIVNNATNVVIKVCEFQFCNDPFLGVYYHKNNKSWMESEFRVYSSANNCTFEYVSQPFLMDLEGKQGNFKNLREFVFKNIDGYFKIYSKHTPINLVRDLPQGFSALEPLVDLPIGINITRFQTLLALHRSYLTPGDSSSGWTAGAAAYYVGYLQPRTFLLKYNENGTITDAVDCALDPLSETKCTLKSFTVEKGIYQTSNFRVQPTESIVRFPNITNLCPFGEVFNATRFASVYAWNRKRISNCVADYSVLYNSASFSTFKCYGVSPTKLNDLCFTNVYADSFVIRGDEVRQIAPGQTGKIADYNYKLPDDFTGCVIAWNSNNLDSKVGGNYNYLYRLFRKSNLKPFERDISTEIYQAGSTPCNGVEGFNCYFPLQSYGFQPTNGVGYQPYRVVVLSFELLHAPATVCGPKKSTPLVKNKCVNFNFNGLTGTGVLTESNKKFLPFQQFGRDIADTTDAVRDPQTLEILDITPCSFGGVSVITPGTNTSNQVAVLYQNVNCTEVPVAIHADQLTPTWRVYSTGSNVFQTRAGCLIGAEHVNNSYECDIPIGAGICASYQTQTNSPSRAGSVASQSIIAYTMSLGAENSVAYSNNSIAIPTNFTISVTTEILPVSMTKTSVDCTMYICGDSTECSNLLLQYGSFCTQLNRALTGIAVEQDKNTQEVFAQVKQIYKTPPIKDFGGFNFSQILPDPSKPSKRSFIEDLLFNKVTLADAGFIKQYGDCLGDIAARDLICAQKFNGLTVLPPLLTDEMIAQYTSALLAGTITCGWTFGAGACLQIPFAMQMAYRFNGIGVTQNVLYENQKLIANQFNSAIGKIQDSLSSTPSALGKLQDVVNQNAQALNTLVKQLSSNFGAISSVLNDILSRLDKVEAEVQIDRLITGRLQSLQTYVTQQLIRAAEIRASANLAATKMSECVLGQSKRVDFCGKGYHLMSFPQSAPHGVVFLHVTYVPAQEKNFTTAPAICHDGKAHFPREGVFVSNGTHWFVTQRNFYEPQIITTDNTFVSGNCDVVIGIVNNTVYDPLQPELDSFKEELDKYFKNHTSPDVDLGDISGINASVVNIQKEIDRLNEVAKNLNESLIDLQELGKYEQGSGYIPEAPRDGQAYVRKDGEWVLLSTFLGRSLEVLFQGPGSLPETGGGSDYKDDDDKGGGGSGGGGSGGGGSGGGGSGGGGSHHHHHH

SEQ ID NO: 83 - protein, 1297 aa, Artificial Sequence
  source: /note="Description of Artificial Sequence: Synthetic polypeptide"
MFVFLVLLPLVSSQCVNLTTRTQLPPAYTNSFTRGVYYPDKVFRSSVLHSTQDLFLPFFSNVTWFHAIHVSGTNGTKRFDNPVLPFNDGVYFASTEKSNIIRGWIFGTTLDSKTQSLLIVNNATNVVIKVCEFQFCNDPFLGVYYHKNNKSWMESEFRVYSSANNCTFEYVSQPFLMDLEGKQGNFKNLREFVFKNIDGYFKIYSKHTPINLVRDLPQGFSALEPLVDLPIGINITRFQTLLALHRSYLTPGDSSSGWTAGAAAYYVGYLQPRTFLLKYNENGTITDAVDCALDPLSETKCTLKSFTVEKGIYQTSNFRVQPTESIVRFPNITNLCPFGEVFNATRFASVYAWNRKRISNCVADYSVLYNSASFSTFKCYGVSPTKLNDLCFTNVYADSFVIRGDEVRQIAPGQTGKIADYNYKLPDDFTGCVIAWNSNNLDSKVGGNYNYLYRLFRKSNLKPFERDISTEIYQAGSTPCNGVEGFNCYFPLQSYGFQPTNGVGYQPYRVVVLSFELLHAPATVCGPKKSTPLVKNKCVNFNFNGLTGTGVLTESNKKFLPFQQFGRDIADITDAVRDPQTLEILDITPCSFGGVSVITPGTNTSNQVAVLYQDVNCTEVPVAIHADQLTPTWRVYSTGSNVFQTRAGCLIGAEHVNNSYECDIPIGAGICASYQTQTNSPSRAGSVASQSIIAYTMSLGAENSVAYSNNSIAIPTNFTISVTTEILPVSMTKTSVDCTMYICGDSTECSNLLLQYGSFCTQLNRALTGIAVEQDKNTQEVFAQVKQIYKTPPIKDFGGFNFSQILPDPSKPSKRSFIEDLLFNKVTLADAGFIKQYGDCLGDIAARDLICAQKFNGLTVLPPLLTDEMIAQYTSALLACTITSGWTCGAGAALQIPFAMQMAYRFNGIGVTQNVLYENQKLIANQFNSAIGKIQDSLSSTPSALGKLQDVVNQNAQALNTLVKQLSSNFGAISSVLNDILSRLDKVEAEVQIDRLITGRLQSLQTYVTQQLIRAAEIRASANLAATKMSECVLGQSKRVDFCGKGYHLMSFPQSAPHGVVFLHVTYVPAQEKNFTTAPAICHDGKAHFPREGVFVSNGTHWFVTQRNFYEPQIITTDNTFVSGNCDVVIGIVNNTVYDPLQPELDSFKEELDKYFKNHTSPDVDLGDISGINASVVNIQKEIDRLNEVAKNLNESLIDLQELGKYEQGSGYIPEAPRDGQAYVRKDGEWVLLSTFLGRSLEVLFQGPGSLPETGGGSDYKDDDDKGGGGSGGGGSGGGGSGGGGSGGGGSHHHHHH

SEQ ID NO: 84 - protein, 1297 aa, Artificial Sequence
  source: /note="Description of Artificial Sequence: Synthetic polypeptide"
MFVFLVLLPLVSSQCVNLTTRTQLPPAYTNSFTRGVYYPDKVFRSSVLHSTQDLFLPFFSNVTWFHAIHVSGTNGTKRFDNPVLPFNDGVYFASTEKSNIIRGWIFGTTLDSKTQSLLIVNNATNVVIKVCEFQFCNDPFLGVYYHKNNKSWMESEFRVYSSANNCTFEYVSQPFLMDLEGKQGNFKNLREFVFKNIDGYFKIYSKHTPINLVRDLPQGFSALEPLVDLPIGINITRFQTLLALHRSYLTPGDSSSGWTAGAAAYYVGYLQPRTFLLKYNENGTITDAVDCALDPLSETKCTLKSFTVEKGIYQTSNFRVQPTESIVRFPNITNLCPFGEVFNATRFASVYAWNRKRISNCVADYSVLYNSASFSTFKCYGVSPTKLNDLCFTNVYADSFVIRGDEVRQIAPGQTGKIADYNYKLPDDFTGCVIAWNSNNLDSKVGGNYNYLYRLFRKSNLKPFERDISTEIYQAGSTPCNGVEGFNCYFPLQSYGFQPTNGVGYQPYRVVVLSFELLHAPATVCGPKKSTPLVKNKCVNFNFNGLTGTGVLTESNKKFLPFQQFGRDIADITDAVRDPQTLEILDITPCSFGGVSVITPGTNTSNQVAVLYQDVNCTEVPVAIHADQLTPTWRVYSTGSNVFQTRAGCLIGAEHVNNSYECDIPIGAGICASYQTQTNSPSRAGSVASQSIIAYTMSLGAENSVAYSNNSIAIPTNFTISVTTEILPVSMTKTSVDCTMYICGDSTECSNLLLQYGSFCTQLNRALTGIAVEQDKNTQEVFAQVKQIYKTPPIKDFGGFNFSQILPDPSKPSKRSFIEDLLFNKVTLADAGFIKQYGDCLGDIAARDLICAQKFNGLTVLPPLLTDEMIAQYTSALLAGTITCGWTFGAGACLQIPFAMQMAYRFNGIGVTQNVLYENQKLIANQFNSAIGKIQDSLSSTPSALGKLQDVVNQNAQALNTLVKQLSSNFGAISSVLNDILSRLDKVEAEVQIDRLITGRLQSLQTYVTQQLIRAAEIRASANLAATKMSECVLGQSKRVDFCGKGYHLMSFPQSAPHGVVFLHVTYVPAQEKNFTTAPAICHDGKAHFPREGVFVSNGTHWFVTQRNFYEPQIITTDNTFVSGNCDVVIGIVNNTVYDPLQPELDSFKEELDKYFKNHTSPDVDLGDISGINASVVNIQKEIDRLNEVAKNLNESLIDLQELGKYEQGSGYIPEAPRDGQAYVRKDGEWVLLSTFLGRSLEVLFQGPGSLPETGGGSDYKDDDDKGGGGSGGGGSGGGGSGGGGSGGGGSHHHHHH

SEQ ID NO: 85 - protein, 1297 aa, Artificial Sequence
  source: /note="Description of Artificial Sequence: Synthetic polypeptide"
MFVFLVLLPLVSSQCVNLTTRTQLPPAYTNSFTRGVYYPDKVFRSSVLHSTQDLFLPFFSNVTWFHAIHVSGTNGTKRFDNPVLPFNDGVYFASTEKSNIIRGWIFGTTLDSKTQSLLIVNNATNVVIKVCEFQFCNDPFLGVYYHKNNKSWMESEFRVYSSANNCTFEYVSQPFLMDLEGKQGNFKNLREFVFKNIDGYFKIYSKHTPINLVRDLPQGFSALEPLVDLPIGINITRFQTLLALHRSYLTPGDSSSGWTAGAAAYYVGYLQPRTFLLKYNENGTITDAVDCALDPLSETKCTLKSFTVEKGIYQTSNFRVQPTESIVRFPNITNLCPFGEVFNATRFASVYAWNRKRISNCVADYSVLYNSASFSTFKCYGVSPTKLNDLCFTNVYADSFVIRGDEVRQIAPGQTGKIADYNYKLPDDFTGCVIAWNSNNLDSKVGGNYNYLYRLFRKSNLKPFERDISTEIYQAGSTPCNGVEGFNCYFPLQSYGFQPTNGVGYQPYRVVVLSFELLHAPATVCGPKKSTPLVKNKCVNFNFNGLTGTGVLTESNKKFLPFQQFGRDIADITDAVRDPQTLEILDITPCSFGGVSVITPGTNTSNQVAVLYQNVNCTEVPVAIHADQLTPTWRVYSTGSNVFQTRAGCLIGAEHVNNSYECDIPIGAGICASYQTQTNSPSRAGSVASQSIIAYTMSLGAENSVAYSNNSIAIPTNFTISVTTEILPVSMTKTSVDCTMYICGDSTECSNLLLQYGSFCTQLNRALTGIAVEQDKNTQEVFAQVKQIYKTPPIKDFGGFNFSQILPDPSKPSKRSFIEDLLFNKVTLADAGFIKQYGDCLGDIAARDLICAQKFNGLTVLPPLLTDEMIAQYTSALLAGTITSGWTFGAGPALQIPFAMQMAYRFNGIGVTQNVLYENQKLIANQFNSAIGKIQDSLSSTASALGKLQDVVNQNAQALNTLVKQLSSNFGAISSVLNDILSRLDKVEAEVQIDRLITGRLQSLQTYVTQQLIRAAEIRASANLAATKMSECVLGQSKRVDFCGKGYHLMSFPQSAPHGVVFLHVTYVPAQEKNFTTAPAICHDGKAHFPREGVFVSNGTHWFVTQRNFYEPQIITTDNTFVSGNCDVVIGIVNNTVYDPLQPELDSFKEELDKYFKNHTSPDVDLGDISGINASVVNIQKEIDRLNEVAKNLNESLIDLQELGKYEQGSGYIPEAPRDGQAYVRKDGEWVLLSTFLGRSLEVLFQGPGSLPETGGGSDYKDDDDKGGGGSGGGGSGGGGSGGGGSGGGGSHHHHHH

SEQ ID NO: 86 - protein, 1297 aa, Artificial Sequence
  source: /note="Description of Artificial Sequence: Synthetic polypeptide"
MFVFLVLLPLVSSQCVNLTTRTQLPPAYTNSFTRGVYYPDKVFRSSVLHSTQDLFLPFFSNVTWFHAIHVSGTNGTKRFDNPVLPFNDGVYFASTEKSNIIRGWIFGTTLDSKTQSLLIVNNATNVVIKVCEFQFCNDPFLGVYYHKNNKSWMESEFRVYSSANNCTFEYVSQPFLMDLEGKQGNFKNLREFVFKNIDGYFKIYSKHTPINLVRDLPQGFSALEPLVDLPIGINITRFQTLLALHRSYLTPGDSSSGWTAGAAAYYVGYLQPRTFLLKYNENGTITDAVDCALDPLSETKCTLKSFTVEKGIYQTSNFRVQPTESIVRFPNITNLCPFGEVFNATRFASVYAWNRKRISNCVADYSVLYNSASFSTFKCYGVSPTKLNDLCFTNVYADSFVIRGDEVRQIAPGQTGKIADYNYKLPDDFTGCVIAWNSNNLDSKVGGNYNYLYRLFRKSNLKPFERDISTEIYQAGSTPCNGVEGFNCYFPLQSYGFQPTNGVGYQPYRVVVLSFELLHAPATVCGPKKSTNLVKNKCVNFNFNGLTGTGVLTESNKKFLPFQQFGRDIADITDAVRDPQTLEILDITPCSFGGVSVITPGTNTSNQVAVLYQNVNCTEVPVAIHADQLTPTWRVYSTGSNVFQTRAGCLIGAEHVNNSYECDIPIGAGICASYQTQTNSPSRAGSVASQSIIAYTMSLGAENSVAYSNNSIAIPTNFTISVTTEILPVSMTKTSVDCTMYICGDSTECSNLLLQYGSFCTQLNRALTGIAVEQDKNTQEVFAQVKQIYKTPPIKDFGGFNFSQILPDPSKPSKRSFIEDLLFNKVTLADAGFIKQYGDCLGDIAARDLICAQKFNGLTVLPPLLTDEMIAQYTSALLACTITSGWTCGAGPALQIPFAMQMAYRFNGIGVTQNVLYENQKLIANQFNSAIGKIQDSLSSTASALGKLQDVVNQNAQALNTLVKQLSSNFGAISSVLNDILSRLDKVEAEVQIDRLITGRLQSLQTYVTQQLIRAAEIRASANLAATKMSECVLGQSKRVDFCGKGYHLMSFPQSAPHGVVFLHVTYVPAQEKNFTTAPAICHDGKAHFPREGVFVSNGTHWFVTQRNFYEPQIITTDNTFVSGNCDVVIGIVNNTVYDPLQPELDSFKEELDKYFKNHTSPDVDLGDISGINASVVNIQKEIDRLNEVAKNLNESLIDLQELGKYEQGSGYIPEAPRDGQAYVRKDGEWVLLSTFLGRSLEVLFQGPGSLPETGGGSDYKDDDDKGGGGSGGGGSGGGGSGGGGSGGGGSHHHHHH

SEQ ID NO: 87 - protein, 1297 aa, Artificial Sequence
  source: /note="Description of Artificial Sequence: Synthetic polypeptide"
MFVFLVLLPLVSSQCVNLTTRTQLPPAYTNSFTRGVYYPDKVFRSSVLHSTQDLFLPFFSNVTWFHAIHVSGTNGTKRFDNPVLPFNDGVYFASTEKSNIIRGWIFGTTLDSKTQSLLIVNNATNVVIKVCEFQFCNDPFLGVYYHKNNKSWMESEFRVYSSANNCTFEYVSQPFLMDLEGKQGNFKNLREFVFKNIDGYFKIYSKHTPINLVRDLPQGFSALEPLVDLPIGINITRFQTLLALHRSYLTPGDSSSGWTAGAAAYYVGYLQPRTFLLKYNENGTITDAVDCALDPLSETKCTLKSFTVEKGIYQTSNFRVQPTESIVRFPNITNLCPFGEVFNATRFASVYAWNRKRISNCVADYSVLYNSASFSTFKCYGVSPTKLNDLCFTNVYADSFVIRGDEVRQIAPGQTGKIADYNYKLPDDFTGCVIAWNSNNLDSKVGGNYNYLYRLFRKSNLKPFERDISTEIYQAGSTPCNGVEGFNCYFPLQSYGFQPTNGVGYQPYRVVVLSFELLHAPATVCGPKKSTNLVKNKCVNFNFNGLTGTGVLTESNKKFLPFQQFGRDIADITDAVRDPQTLEILDITPCSFGGVSVITPGTNTSNQVAVLYQNVNCTEVPVAIHADQLTPTWRVYSTGSNVFQTRAGCLIGAEHVNNSYECDIPIGAGICASYQTQTNSPSRAGSVASQSIIAYTMSLGAENSVAYSNNSIAIPTNFTISVTTEILPVSMTKTSVDCTMYICGDSTECSNLLLQYGSFCTQLNRALTGIAVEQDKNTQEVFAQVKQIYKTPPIKDFGGFNFSQILPDPSKPSKRSFIEDLLFNKVTLADAGFIKQYGDCLGDIAARDLICAQKFNGLTVLPPLLTDEMIAQYTSALLAGTITCGWTFGAGPCLQIPFAMQMAYRFNGIGVTQNVLYENQKLIANQFNSAIGKIQDSLSSTASALGKLQDVVNQNAQALNTLVKQLSSNFGAISSVLNDILSRLDKVEAEVQIDRLITGRLQSLQTYVTQQLIRAAEIRASANLAATKMSECVLGQSKRVDFCGKGYHLMSFPQSAPHGVVFLHVTYVPAQEKNFTTAPAICHDGKAHFPREGVFVSNGTHWFVTQRNFYEPQIITTDNTFVSGNCDVVIGIVNNTVYDPLQPELDSFKEELDKYFKNHTSPDVDLGDISGINASVVNIQKEIDRLNEVAKNLNESLIDLQELGKYEQGSGYIPEAPRDGQAYVRKDGEWVLLSTFLGRSLEVLFQGPGSLPETGGGSDYKDDDDKGGGGSGGGGSGGGGSGGGGSGGGGSHHHHHH

SEQ ID NO: 88 - protein, 1297 aa, Artificial Sequence
  source: /note="Description of Artificial Sequence: Synthetic polypeptide"
MFVFLVLLPLVSSQCVNLTTRTQLPPAYTNSFTRGVYYPDKVFRSSVLHSTQDLFLPFFSNVTWFHAIHVSGTNGTKRFDNPVLPFNDGVYFASTEKSNIIRGWIFGTTLDSKTQSLLIVNNATNVVIKVCEFQFCNDPFLGVYYHKNNKSWMESEFRVYSSANNCTFEYVSQPFLMDLEGKQGNFKNLREFVFKNIDGYFKIYSKHTPINLVRDLPQGFSALEPLVDLPIGINITRFQTLLALHRSYLTPGDSSSGWTAGAAAYYVGYLQPRTFLLKYNENGTITDAVDCALDPLSETKCTLKSFTVEKGIYQTSNFRVQPTESIVRFPNITNLCPFGEVFNATRFASVYAWNRKRISNCVADYSVLYNSASFSTFKCYGVSPTKLNDLCFTNVYADSFVIRGDEVRQIAPGQTGKIADYNYKLPDDFTGCVIAWNSNNLDSKVGGNYNYLYRLFRKSNLKPFERDISTEIYQAGSTPCNGVEGFNCYFPLQSYGFQPTNGVGYQPYRVVVLSFELLHAPATVCGPKKSTPLVKNKCVNFNFNGLTGTGVLTESNKKFLPFQQFGRDIADTTDAVRDPQTLEILDITPCSFGGVSVITPGTNTSNQVAVLYQNVNCTEVPVAIHADQLTPTWRVYSTGSNVFQTRAGCLIGAEHVNNSYECDIPIGAGICASYQTQTNSPSRAGSVASQSIIAYTMSLGAENSVAYSNNSIAIPTNFTISVTTEILPVSMTKTSVDCTMYICGDSTECSNLLLQYGSFCTQLNRALTGIAVEQDKNTQEVFAQVKQIYKTPPIKDFGGFNFSQILPDPSKPSKRSFIEDLLFNKVTLADAGFIKQYGDCLGDIAARDLICAQKFNGLTVLPPLLTDEMIAQYTSALLACTITSGWTCGAGPALQIPFAMQMAYRFNGIGVTQNVLYENQKLIANQFNSAIGKIQDSLSSTASALGKLQDVVNQNAQALNTLVKQLSSNFGAISSVLNDILSRLDKVEAEVQIDRLITGRLQSLQTYVTQQLIRAAEIRASANLAATKMSECVLGQSKRVDFCGKGYHLMSFPQSAPHGVVFLHVTYVPAQEKNFTTAPAICHDGKAHFPREGVFVSNGTHWFVTQRNFYEPQIITTDNTFVSGNCDVVIGIVNNTVYDPLQPELDSFKEELDKYFKNHTSPDVDLGDISGINASVVNIQKEIDRLNEVAKNLNESLIDLQELGKYEQGSGYIPEAPRDGQAYVRKDGEWVLLSTFLGRSLEVLFQGPGSLPETGGGSDYKDDDDKGGGGSGGGGSGGGGSGGGGSGGGGSHHHHHH

SEQ ID NO: 89 - protein, 1297 aa, Artificial Sequence
  source: /note="Description of Artificial Sequence: Synthetic polypeptide"
MFVFLVLLPLVSSQCVNLTTRTQLPPAYTNSFTRGVYYPDKVFRSSVLHSTQDLFLPFFSNVTWFHAIHVSGTNGTKRFDNPVLPFNDGVYFASTEKSNIIRGWIFGTTLDSKTQSLLIVNNATNVVIKVCEFQFCNDPFLGVYYHKNNKSWMESEFRVYSSANNCTFEYVSQPFLMDLEGKQGNFKNLREFVFKNIDGYFKIYSKHTPINLVRDLPQGFSALEPLVDLPIGINITRFQTLLALHRSYLTPGDSSSGWTAGAAAYYVGYLQPRTFLLKYNENGTITDAVDCALDPLSETKCTLKSFTVEKGIYQTSNFRVQPTESIVRFPNITNLCPFGEVFNATRFASVYAWNRKRISNCVADYSVLYNSASFSTFKCYGVSPTKLNDLCFTNVYADSFVIRGDEVRQIAPGQTGKIADYNYKLPDDFTGCVIAWNSNNLDSKVGGNYNYLYRLFRKSNLKPFERDISTEIYQAGSTPCNGVEGFNCYFPLQSYGFQPTNGVGYQPYRVVVLSFELLHAPATVCGPKKSTPLVKNKCVNFNFNGLTGTGVLTESNKKFLPFQQFGRDIADTTDAVRDPQTLEILDITPCSFGGVSVITPGTNTSNQVAVLYQNVNCTEVPVAIHADQLTPTWRVYSTGSNVFQTRAGCLIGAEHVNNSYECDIPIGAGICASYQTQTNSPSRAGSVASQSIIAYTMSLGAENSVAYSNNSIAIPTNFTISVTTEILPVSMTKTSVDCTMYICGDSTECSNLLLQYGSFCTQLNRALTGIAVEQDKNTQEVFAQVKQIYKTPPIKDFGGFNFSQILPDPSKPSKRSFIEDLLFNKVTLADAGFIKQYGDCLGDIAARDLICAQKFNGLTVLPPLLTDEMIAQYTSALLAGTITCGWTFGAGPCLQIPFAMQMAYRFNGIGVTQNVLYENQKLIANQFNSAIGKIQDSLSSTASALGKLQDVVNQNAQALNTLVKQLSSNFGAISSVLNDILSRLDKVEAEVQIDRLITGRLQSLQTYVTQQLIRAAEIRASANLAATKMSECVLGQSKRVDFCGKGYHLMSFPQSAPHGVVFLHVTYVPAQEKNFTTAPAICHDGKAHFPREGVFVSNGTHWFVTQRNFYEPQIITTDNTFVSGNCDVVIGIVNNTVYDPLQPELDSFKEELDKYFKNHTSPDVDLGDISGINASVVNIQKEIDRLNEVAKNLNESLIDLQELGKYEQGSGYIPEAPRDGQAYVRKDGEWVLLSTFLGRSLEVLFQGPGSLPETGGGSDYKDDDDKGGGGSGGGGSGGGGSGGGGSGGGGSHHHHHH

SEQ ID NO: 90 - protein, 1297 aa, Artificial Sequence
  source: /note="Description of Artificial Sequence: Synthetic polypeptide"
MFVFLVLLPLVSSQCVNLTTRTQLPPAYTNSFTRGVYYPDKVFRSSVLHSTQDLFLPFFSNVTWFHAIHVSGTNGTKRFDNPVLPFNDGVYFASTEKSNIIRGWIFGTTLDSKTQSLLIVNNATNVVIKVCEFQFCNDPFLGVYYHKNNKSWMESEFRVYSSANNCTFEYVSQPFLMDLEGKQGNFKNLREFVFKNIDGYFKIYSKHTPINLVRDLPQGFSALEPLVDLPIGINITRFQTLLALHRSYLTPGDSSSGWTAGAAAYYVGYLQPRTFLLKYNENGTITDAVDCALDPLSETKCTLKSFTVEKGIYQTSNFRVQPTESIVRFPNITNLCPFGEVFNATRFASVYAWNRKRISNCVADYSVLYNSASFSTFKCYGVSPTKLNDLCFTNVYADSFVIRGDEVRQIAPGQTGKIADYNYKLPDDFTGCVIAWNSNNLDSKVGGNYNYLYRLFRKSNLKPFERDISTEIYQAGSTPCNGVEGFNCYFPLQSYGFQPTNGVGYQPYRVVVLSFELLHAPATVCGPKKSTPLVKNKCVNFNFNGLTGTGVLTESNKKFLPFQQFGRDIADITDAVRDPQTLEILDITPCSFGGVSVITPGTNTSNQVAVLYQDVNCTEVPVAIHADQLTPTWRVYSTGSNVFQTRAGCLIGAEHVNNSYECDIPIGAGICASYQTQTNSPSRAGSVASQSIIAYTMSLGAENSVAYSNNSIAIPTNFTISVTTEILPVSMTKTSVDCTMYICGDSTECSNLLLQYGSFCTQLNRALTGIAVEQDKNTQEVFAQVKQIYKTPPIKDFGGFNFSQILPDPSKPSKRSFIEDLLFNKVTLADAGFIKQYGDCLGDIAARDLICAQKFNGLTVLPPLLTDEMIAQYTSALLACTITSGWTCGAGPALQIPFAMQMAYRFNGIGVTQNVLYENQKLIANQFNSAIGKIQDSLSSTASALGKLQDVVNQNAQALNTLVKQLSSNFGAISSVLNDILSRLDKVEAEVQIDRLITGRLQSLQTYVTQQLIRAAEIRASANLAATKMSECVLGQSKRVDFCGKGYHLMSFPQSAPHGVVFLHVTYVPAQEKNFTTAPAICHDGKAHFPREGVFVSNGTHWFVTQRNFYEPQIITTDNTFVSGNCDVVIGIVNNTVYDPLQPELDSFKEELDKYFKNHTSPDVDLGDISGINASVVNIQKEIDRLNEVAKNLNESLIDLQELGKYEQGSGYIPEAPRDGQAYVRKDGEWVLLSTFLGRSLEVLFQGPGSLPETGGGSDYKDDDDKGGGGSGGGGSGGGGSGGGGSGGGGSHHHHHH

SEQ ID NO: 91 - protein, 1297 aa, Artificial Sequence
  source: /note="Description of Artificial Sequence: Synthetic polypeptide"
MFVFLVLLPLVSSQCVNLTTRTQLPPAYTNSFTRGVYYPDKVFRSSVLHSTQDLFLPFFSNVTWFHAIHVSGTNGTKRFDNPVLPFNDGVYFASTEKSNIIRGWIFGTTLDSKTQSLLIVNNATNVVIKVCEFQFCNDPFLGVYYHKNNKSWMESEFRVYSSANNCTFEYVSQPFLMDLEGKQGNFKNLREFVFKNIDGYFKIYSKHTPINLVRDLPQGFSALEPLVDLPIGINITRFQTLLALHRSYLTPGDSSSGWTAGAAAYYVGYLQPRTFLLKYNENGTITDAVDCALDPLSETKCTLKSFTVEKGIYQTSNFRVQPTESIVRFPNITNLCPFGEVFNATRFASVYAWNRKRISNCVADYSVLYNSASFSTFKCYGVSPTKLNDLCFTNVYADSFVIRGDEVRQIAPGQTGKIADYNYKLPDDFTGCVIAWNSNNLDSKVGGNYNYLYRLFRKSNLKPFERDISTEIYQAGSTPCNGVEGFNCYFPLQSYGFQPTNGVGYQPYRVVVLSFELLHAPATVCGPKKSTPLVKNKCVNFNFNGLTGTGVLTESNKKFLPFQQFGRDIADITDAVRDPQTLEILDITPCSFGGVSVITPGTNTSNQVAVLYQDVNCTEVPVAIHADQLTPTWRVYSTGSNVFQTRAGCLIGAEHVNNSYECDIPIGAGICASYQTQTNSPSRAGSVASQSIIAYTMSLGAENSVAYSNNSIAIPTNFTISVTTEILPVSMTKTSVDCTMYICGDSTECSNLLLQYGSFCTQLNRALTGIAVEQDKNTQEVFAQVKQIYKTPPIKDFGGFNFSQILPDPSKPSKRSFIEDLLFNKVTLADAGFIKQYGDCLGDIAARDLICAQKFNGLTVLPPLLTDEMIAQYTSALLAGTITCGWTFGAGPCLQIPFAMQMAYRFNGIGVTQNVLYENQKLIANQFNSAIGKIQDSLSSTASALGKLQDVVNQNAQALNTLVKQLSSNFGAISSVLNDILSRLDKVEAEVQIDRLITGRLQSLQTYVTQQLIRAAEIRASANLAATKMSECVLGQSKRVDFCGKGYHLMSFPQSAPHGVVFLHVTYVPAQEKNFTTAPAICHDGKAHFPREGVFVSNGTHWFVTQRNFYEPQIITTDNTFVSGNCDVVIGIVNNTVYDPLQPELDSFKEELDKYFKNHTSPDVDLGDISGINASVVNIQKEIDRLNEVAKNLNESLIDLQELGKYEQGSGYIPEAPRDGQAYVRKDGEWVLLSTFLGRSLEVLFQGPGSLPETGGGSDYKDDDDKGGGGSGGGGSGGGGSGGGGSGGGGSHHHHHH

SEQ ID NO: 92 - protein, 1297 aa, Artificial Sequence
  source: /note="Description of Artificial Sequence: Synthetic polypeptide"
MFVFLVLLPLVSSQCVNLTTRTQLPPAYTNSFTRGVYYPDKVFRSSVLHSTQDLFLPFFSNVTWFHAIHVSGTNGTKRFDNPVLPFNDGVYFASTEKSNIIRGWIFGTTLDSKTQSLLIVNNATNVVIKVCEFQFCNDPFLGVYYHKNNKSWMESEFRVYSSANNCTFEYVSQPFLMDLEGKQGNFKNLREFVFKNIDGYFKIYSKHTPINLVRDLPQGFSALEPLVDLPIGINITRFQTLLALHRSYLTPGDSSSGWTAGAAAYYVGYLQPRTFLLKYNENGTITDAVDCALDPLSETKCTLKSFTVEKGIYQTSNFRVQPTESIVRFPNITNLCPFGEVFNATRFASVYAWNRKRISNCVADYSVLYNSASFSTFKCYGVSPTKLNDLCFTNVYADSFVIRGDEVRQIAPGQTGKIADYNYKLPDDFTGCVIAWNSNNLDSKVGGNYNYLYRLFRKSNLKPFERDISTEIYQAGSTPCNGVEGFNCYFPLQSYGFQPTNGVGYQPYRVVVLSFELLHAPATVCGPKKSTPLVKNKCVNFNFNGLTGTGVLTESNKKFLPFQQFGRDIADITDAVRDPQTLEILDITPCSFGGVSVITPGTNTSNQVAVLYQNVNCTEVPVAIHADQLTPTWRVYSTGSNVFQTRAGCLIGAEHVNNSYECDIPIGAGICASYQTQTNSPSRAGSVASQSIIAYTMSLGAENSVAYSNNSIAIPTNFTISVTTEILPVSMTKTSVDCTMYICGDSTECSNLLLQYGSFCTQLNRALTGIAVEQDKNTQEVFAQVKQIYKTPPIKDFGGFNFSQILPDPSKPSKRSFIEDLLFNKVTLADAGFIKQYGDCLGDIAARDLICAQKFNGLTVLPPLLTDEMIAQYTSALLACTITSGWTCGAGAALQIPFAMQMAYRFNGIGVTQNVLYENQKLIANQFNSAIGKIQDSLSSTASALGKLQDVVNQNAQALNTLVKQLSSNFGAISSVLNDILSRLDKVEAEVQIDRLITGRLQSLQTYVTQQLIRAAEIRASANLAATKMSECVLGQSKRVDFCGKGYHLMSFPQSAPHGVVFLHVTYVPAQEKNFTTAPAICHDGKAHFPREGVFVSNGTHWFVTQRNFYEPQIITTDNTFVSGNCDVVIGIVNNTVYDPLQPELDSFKEELDKYFKNHTSPDVDLGDISGINASVVNIQKEIDRLNEVAKNLNESLIDLQELGKYEQGSGYIPEAPRDGQAYVRKDGEWVLLSTFLGRSLEVLFQGPGSLPETGGGSDYKDDDDKGGGGSGGGGSGGGGSGGGGSGGGGSHHHHHH

SEQ ID NO: 93 - protein, 1297 aa, Artificial Sequence
  source: /note="Description of Artificial Sequence: Synthetic polypeptide"
MFVFLVLLPLVSSQCVNLTTRTQLPPAYTNSFTRGVYYPDKVFRSSVLHSTQDLFLPFFSNVTWFHAIHVSGTNGTKRFDNPVLPFNDGVYFASTEKSNIIRGWIFGTTLDSKTQSLLIVNNATNVVIKVCEFQFCNDPFLGVYYHKNNKSWMESEFRVYSSANNCTFEYVSQPFLMDLEGKQGNFKNLREFVFKNIDGYFKIYSKHTPINLVRDLPQGFSALEPLVDLPIGINITRFQTLLALHRSYLTPGDSSSGWTAGAAAYYVGYLQPRTFLLKYNENGTITDAVDCALDPLSETKCTLKSFTVEKGIYQTSNFRVQPTESIVRFPNITNLCPFGEVFNATRFASVYAWNRKRISNCVADYSVLYNSASFSTFKCYGVSPTKLNDLCFTNVYADSFVIRGDEVRQIAPGQTGKIADYNYKLPDDFTGCVIAWNSNNLDSKVGGNYNYLYRLFRKSNLKPFERDISTEIYQAGSTPCNGVEGFNCYFPLQSYGFQPTNGVGYQPYRVVVLSFELLHAPATVCGPKKSTPLVKNKCVNFNFNGLTGTGVLTESNKKFLPFQQFGRDIADITDAVRDPQTLEILDITPCSFGGVSVITPGTNTSNQVAVLYQNVNCTEVPVAIHADQLTPTWRVYSTGSNVFQTRAGCLIGAEHVNNSYECDIPIGAGICASYQTQTNSPSRAGSVASQSIIAYTMSLGAENSVAYSNNSIAIPTNFTISVTTEILPVSMTKTSVDCTMYICGDSTECSNLLLQYGSFCTQLNRALTGIAVEQDKNTQEVFAQVKQIYKTPPIKDFGGFNFSQILPDPSKPSKRSFIEDLLFNKVTLADAGFIKQYGDCLGDIAARDLICAQKFNGLTVLPPLLTDEMIAQYTSALLAGTITCGWTFGAGACLQIPFAMQMAYRFNGIGVTQNVLYENQKLIANQFNSAIGKIQDSLSSTASALGKLQDVVNQNAQALNTLVKQLSSNFGAISSVLNDILSRLDKVEAEVQIDRLITGRLQSLQTYVTQQLIRAAEIRASANLAATKMSECVLGQSKRVDFCGKGYHLMSFPQSAPHGVVFLHVTYVPAQEKNFTTAPAICHDGKAHFPREGVFVSNGTHWFVTQRNFYEPQIITTDNTFVSGNCDVVIGIVNNTVYDPLQPELDSFKEELDKYFKNHTSPDVDLGDISGINASVVNIQKEIDRLNEVAKNLNESLIDLQELGKYEQGSGYIPEAPRDGQAYVRKDGEWVLLSTFLGRSLEVLFQGPGSLPETGGGSDYKDDDDKGGGGSGGGGSGGGGSGGGGSGGGGSHHHHHH

SEQ ID NO: 94 - protein, 1297 aa, Artificial Sequence
  source: /note="Description of Artificial Sequence: Synthetic polypeptide"
MFVFLVLLPLVSSQCVNLTTRTQLPPAYTNSFTRGVYYPDKVFRSSVLHSTQDLFLPFFSNVTWFHAIHVSGTNGTKRFDNPVLPFNDGVYFASTEKSNIIRGWIFGTTLDSKTQSLLIVNNATNVVIKVCEFQFCNDPFLGVYYHKNNKSWMESEFRVYSSANNCTFEYVSQPFLMDLEGKQGNFKNLREFVFKNIDGYFKIYSKHTPINLVRDLPQGFSALEPLVDLPIGINITRFQTLLALHRSYLTPGDSSSGWTAGAAAYYVGYLQPRTFLLKYNENGTITDAVDCALDPLSETKCTLKSFTVEKGIYQTSNFRVQPTESIVRFPNITNLCPFGEVFNATRFASVYAWNRKRISNCVADYSVLYNSASFSTFKCYGVSPTKLNDLCFTNVYADSFVIRGDEVRQIAPGQTGKIADYNYKLPDDFTGCVIAWNSNNLDSKVGGNYNYLYRLFRKSNLKPFERDISTEIYQAGSTPCNGVEGFNCYFPLQSYGFQPTNGVGYQPYRVVVLSFELLHAPATVCGPKKSTPLVKNKCVNFNFNGLTGTGVLTESNKKFLPFQQFGRDIADITDAVRDPQTLEILDITPCSFGGVSVITPGTNTSNQVAVLYQNVNCTEVPVAIHADQLTPTWRVYSTGSNVFQTRAGCLIGAEHVNNSYECDIPIGAGICASYQTQTNSPSRAGSVASQSIIAYTMSLGAENSVAYSNNSIAIPTNFTISVTTEILPVSMTKTSVDCTMYICGDSTECSNLLLQYGSFCTQLNRALTGIAVEQDKNTQEVFAQVKQIYKTPPIKDFGGFNFSQILPDPSKPSKRSFIEDLLFNKVTLADAGFIKQYGDCLGDIAARDLICAQKFNGLTVLPPLLTDEMIAQYTSALLAGTITSGWTFGAGPALQIPFAMQMAYRFNGIGVTQNVLYENQKLIANQFNSAIGKIQDSLSSTPSALGKLQDVVNQNAQALNTLVKQLSSNFGAISSVLNDILSRLDKVEAEVQIDRLITGRLQSLQTYVTQQLIRAAEIRASANLAATKMSECVLGQSKRVDFCGKGYHLMSFPQSAPHGVVFLHVTYVPAQEKNFTTAPAICHDGKAHFPREGVFVSNGTHWFVTQRNFYEPQIITTDNTFVSGNCDVVIGIVNNTVYDPLQPELDSFKEELDKYFKNHTSPDVDLGDISGINASVVNIQKEIDRLNEVAKNLNESLIDLQELGKYEQGSGYIPEAPRDGQAYVRKDGEWVLLSTFLGRSLEVLFQGPGSLPETGGGSDYKDDDDKGGGGSGGGGSGGGGSGGGGSGGGGSHHHHHH

SEQ ID NO: 95 - protein, 1297 aa, Artificial Sequence
  source: /note="Description of Artificial Sequence: Synthetic polypeptide"
MFVFLVLLPLVSSQCVNLTTRTQLPPAYTNSFTRGVYYPDKVFRSSVLHSTQDLFLPFFSNVTWFHAIHVSGTNGTKRFDNPVLPFNDGVYFASTEKSNIIRGWIFGTTLDSKTQSLLIVNNATNVVIKVCEFQFCNDPFLGVYYHKNNKSWMESEFRVYSSANNCTFEYVSQPFLMDLEGKQGNFKNLREFVFKNIDGYFKIYSKHTPINLVRDLPQGFSALEPLVDLPIGINITRFQTLLALHRSYLTPGDSSSGWTAGAAAYYVGYLQPRTFLLKYNENGTITDAVDCALDPLSETKCTLKSFTVEKGIYQTSNFRVQPTESIVRFPNITNLCPFGEVFNATRFASVYAWNRKRISNCVADYSVLYNSASFSTFKCYGVSPTKLNDLCFTNVYADSFVIRGDEVRQIAPGQTGKIADYNYKLPDDFTGCVIAWNSNNLDSKVGGNYNYLYRLFRKSNLKPFERDISTEIYQAGSTPCNGVEGFNCYFPLQSYGFQPTNGVGYQPYRVVVLSFELLHAPATVCGPKKSTNLVKNKCVNFNFNGLTGTGVLTESNKKFLPFQQFGRDIADITDAVRDPQTLEILDITPCSFGGVSVITPGTNTSNQVAVLYQNVNCTEVPVAIHADQLTPTWRVYSTGSNVFQTRAGCLIGAEHVNNSYECDIPIGAGICASYQTQTNSPSRAGSVASQSIIAYTMSLGAENSVAYSNNSIAIPTNFTISVTTEILPVSMTKTSVDCTMYICGDSTECSNLLLQYGSFCTQLNRALTGIAVEQDKNTQEVFAQVKQIYKTPPIKDFGGFNFSQILPDPSKPSKRSFIEDLLFNKVTLADAGFIKQYGDCLGDIAARDLICAQKFNGLTVLPPLLTDEMIAQYTSALLACTITSGWTCGAGPALQIPFAMQMAYRFNGIGVTQNVLYENQKLIANQFNSAIGKIQDSLSSTPSALGKLQDVVNQNAQALNTLVKQLSSNFGAISSVLNDILSRLDKVEAEVQIDRLITGRLQSLQTYVTQQLIRAAEIRASANLAATKMSECVLGQSKRVDFCGKGYHLMSFPQSAPHGVVFLHVTYVPAQEKNFTTAPAICHDGKAHFPREGVFVSNGTHWFVTQRNFYEPQIITTDNTFVSGNCDVVIGIVNNTVYDPLQPELDSFKEELDKYFKNHTSPDVDLGDISGINASVVNIQKEIDRLNEVAKNLNESLIDLQELGKYEQGSGYIPEAPRDGQAYVRKDGEWVLLSTFLGRSLEVLFQGPGSLPETGGGSDYKDDDDKGGGGSGGGGSGGGGSGGGGSGGGGSHHHHHH

SEQ ID NO: 96 - protein, 1297 aa, Artificial Sequence
  source: /note="Description of Artificial Sequence: Synthetic polypeptide"
MFVFLVLLPLVSSQCVNLTTRTQLPPAYTNSFTRGVYYPDKVFRSSVLHSTQDLFLPFFSNVTWFHAIHVSGTNGTKRFDNPVLPFNDGVYFASTEKSNIIRGWIFGTTLDSKTQSLLIVNNATNVVIKVCEFQFCNDPFLGVYYHKNNKSWMESEFRVYSSANNCTFEYVSQPFLMDLEGKQGNFKNLREFVFKNIDGYFKIYSKHTPINLVRDLPQGFSALEPLVDLPIGINITRFQTLLALHRSYLTPGDSSSGWTAGAAAYYVGYLQPRTFLLKYNENGTITDAVDCALDPLSETKCTLKSFTVEKGIYQTSNFRVQPTESIVRFPNITNLCPFGEVFNATRFASVYAWNRKRISNCVADYSVLYNSASFSTFKCYGVSPTKLNDLCFTNVYADSFVIRGDEVRQIAPGQTGKIADYNYKLPDDFTGCVIAWNSNNLDSKVGGNYNYLYRLFRKSNLKPFERDISTEIYQAGSTPCNGVEGFNCYFPLQSYGFQPTNGVGYQPYRVVVLSFELLHAPATVCGPKKSTNLVKNKCVNFNFNGLTGTGVLTESNKKFLPFQQFGRDIADITDAVRDPQTLEILDITPCSFGGVSVITPGTNTSNQVAVLYQNVNCTEVPVAIHADQLTPTWRVYSTGSNVFQTRAGCLIGAEHVNNSYECDIPIGAGICASYQTQTNSPSRAGSVASQSIIAYTMSLGAENSVAYSNNSIAIPTNFTISVTTEILPVSMTKTSVDCTMYICGDSTECSNLLLQYGSFCTQLNRALTGIAVEQDKNTQEVFAQVKQIYKTPPIKDFGGFNFSQILPDPSKPSKRSFIEDLLFNKVTLADAGFIKQYGDCLGDIAARDLICAQKFNGLTVLPPLLTDEMIAQYTSALLAGTITCGWTFGAGPCLQIPFAMQMAYRFNGIGVTQNVLYENQKLIANQFNSAIGKIQDSLSSTPSALGKLQDVVNQNAQALNTLVKQLSSNFGAISSVLNDILSRLDKVEAEVQIDRLITGRLQSLQTYVTQQLIRAAEIRASANLAATKMSECVLGQSKRVDFCGKGYHLMSFPQSAPHGVVFLHVTYVPAQEKNFTTAPAICHDGKAHFPREGVFVSNGTHWFVTQRNFYEPQIITTDNTFVSGNCDVVIGIVNNTVYDPLQPELDSFKEELDKYFKNHTSPDVDLGDISGINASVVNIQKEIDRLNEVAKNLNESLIDLQELGKYEQGSGYIPEAPRDGQAYVRKDGEWVLLSTFLGRSLEVLFQGPGSLPETGGGSDYKDDDDKGGGGSGGGGSGGGGSGGGGSGGGGSHHHHHH

SEQ ID NO: 97 - protein, 1297 aa, Artificial Sequence
  source: /note="Description of Artificial Sequence: Synthetic polypeptide"
MFVFLVLLPLVSSQCVNLTTRTQLPPAYTNSFTRGVYYPDKVFRSSVLHSTQDLFLPFFSNVTWFHAIHVSGTNGTKRFDNPVLPFNDGVYFASTEKSNIIRGWIFGTTLDSKTQSLLIVNNATNVVIKVCEFQFCNDPFLGVYYHKNNKSWMESEFRVYSSANNCTFEYVSQPFLMDLEGKQGNFKNLREFVFKNIDGYFKIYSKHTPINLVRDLPQGFSALEPLVDLPIGINITRFQTLLALHRSYLTPGDSSSGWTAGAAAYYVGYLQPRTFLLKYNENGTITDAVDCALDPLSETKCTLKSFTVEKGIYQTSNFRVQPTESIVRFPNITNLCPFGEVFNATRFASVYAWNRKRISNCVADYSVLYNSASFSTFKCYGVSPTKLNDLCFTNVYADSFVIRGDEVRQIAPGQTGKIADYNYKLPDDFTGCVIAWNSNNLDSKVGGNYNYLYRLFRKSNLKPFERDISTEIYQAGSTPCNGVEGFNCYFPLQSYGFQPTNGVGYQPYRVVVLSFELLHAPATVCGPKKSTPLVKNKCVNFNFNGLTGTGVLTESNKKFLPFQQFGRDIADTTDAVRDPQTLEILDITPCSFGGVSVITPGTNTSNQVAVLYQNVNCTEVPVAIHADQLTPTWRVYSTGSNVFQTRAGCLIGAEHVNNSYECDIPIGAGICASYQTQTNSPSRAGSVASQSIIAYTMSLGAENSVAYSNNSIAIPTNFTISVTTEILPVSMTKTSVDCTMYICGDSTECSNLLLQYGSFCTQLNRALTGIAVEQDKNTQEVFAQVKQIYKTPPIKDFGGFNFSQILPDPSKPSKRSFIEDLLFNKVTLADAGFIKQYGDCLGDIAARDLICAQKFNGLTVLPPLLTDEMIAQYTSALLACTITSGWTCGAGPALQIPFAMQMAYRFNGIGVTQNVLYENQKLIANQFNSAIGKIQDSLSSTPSALGKLQDVVNQNAQALNTLVKQLSSNFGAISSVLNDILSRLDKVEAEVQIDRLITGRLQSLQTYVTQQLIRAAEIRASANLAATKMSECVLGQSKRVDFCGKGYHLMSFPQSAPHGVVFLHVTYVPAQEKNFTTAPAICHDGKAHFPREGVFVSNGTHWFVTQRNFYEPQIITTDNTFVSGNCDVVIGIVNNTVYDPLQPELDSFKEELDKYFKNHTSPDVDLGDISGINASVVNIQKEIDRLNEVAKNLNESLIDLQELGKYEQGSGYIPEAPRDGQAYVRKDGEWVLLSTFLGRSLEVLFQGPGSLPETGGGSDYKDDDDKGGGGSGGGGSGGGGSGGGGSGGGGSHHHHHH

SEQ ID NO: 98 - protein, 1297 aa, Artificial Sequence
  source: /note="Description of Artificial Sequence: Synthetic polypeptide"
MFVFLVLLPLVSSQCVNLTTRTQLPPAYTNSFTRGVYYPDKVFRSSVLHSTQDLFLPFFSNVTWFHAIHVSGTNGTKRFDNPVLPFNDGVYFASTEKSNIIRGWIFGTTLDSKTQSLLIVNNATNVVIKVCEFQFCNDPFLGVYYHKNNKSWMESEFRVYSSANNCTFEYVSQPFLMDLEGKQGNFKNLREFVFKNIDGYFKIYSKHTPINLVRDLPQGFSALEPLVDLPIGINITRFQTLLALHRSYLTPGDSSSGWTAGAAAYYVGYLQPRTFLLKYNENGTITDAVDCALDPLSETKCTLKSFTVEKGIYQTSNFRVQPTESIVRFPNITNLCPFGEVFNATRFASVYAWNRKRISNCVADYSVLYNSASFSTFKCYGVSPTKLNDLCFTNVYADSFVIRGDEVRQIAPGQTGKIADYNYKLPDDFTGCVIAWNSNNLDSKVGGNYNYLYRLFRKSNLKPFERDISTEIYQAGSTPCNGVEGFNCYFPLQSYGFQPTNGVGYQPYRVVVLSFELLHAPATVCGPKKSTPLVKNKCVNFNFNGLTGTGVLTESNKKFLPFQQFGRDIADTTDAVRDPQTLEILDITPCSFGGVSVITPGTNTSNQVAVLYQNVNCTEVPVAIHADQLTPTWRVYSTGSNVFQTRAGCLIGAEHVNNSYECDIPIGAGICASYQTQTNSPSRAGSVASQSIIAYTMSLGAENSVAYSNNSIAIPTNFTISVTTEILPVSMTKTSVDCTMYICGDSTECSNLLLQYGSFCTQLNRALTGIAVEQDKNTQEVFAQVKQIYKTPPIKDFGGFNFSQILPDPSKPSKRSFIEDLLFNKVTLADAGFIKQYGDCLGDIAARDLICAQKFNGLTVLPPLLTDEMIAQYTSALLAGTITCGWTFGAGPCLQIPFAMQMAYRFNGIGVTQNVLYENQKLIANQFNSAIGKIQDSLSSTPSALGKLQDVVNQNAQALNTLVKQLSSNFGAISSVLNDILSRLDKVEAEVQIDRLITGRLQSLQTYVTQQLIRAAEIRASANLAATKMSECVLGQSKRVDFCGKGYHLMSFPQSAPHGVVFLHVTYVPAQEKNFTTAPAICHDGKAHFPREGVFVSNGTHWFVTQRNFYEPQIITTDNTFVSGNCDVVIGIVNNTVYDPLQPELDSFKEELDKYFKNHTSPDVDLGDISGINASVVNIQKEIDRLNEVAKNLNESLIDLQELGKYEQGSGYIPEAPRDGQAYVRKDGEWVLLSTFLGRSLEVLFQGPGSLPETGGGSDYKDDDDKGGGGSGGGGSGGGGSGGGGSGGGGSHHHHHH

SEQ ID NO: 99 - protein, 1297 aa, Artificial Sequence
  source: /note="Description of Artificial Sequence: Synthetic polypeptide"
MFVFLVLLPLVSSQCVNLTTRTQLPPAYTNSFTRGVYYPDKVFRSSVLHSTQDLFLPFFSNVTWFHAIHVSGTNGTKRFDNPVLPFNDGVYFASTEKSNIIRGWIFGTTLDSKTQSLLIVNNATNVVIKVCEFQFCNDPFLGVYYHKNNKSWMESEFRVYSSANNCTFEYVSQPFLMDLEGKQGNFKNLREFVFKNIDGYFKIYSKHTPINLVRDLPQGFSALEPLVDLPIGINITRFQTLLALHRSYLTPGDSSSGWTAGAAAYYVGYLQPRTFLLKYNENGTITDAVDCALDPLSETKCTLKSFTVEKGIYQTSNFRVQPTESIVRFPNITNLCPFGEVFNATRFASVYAWNRKRISNCVADYSVLYNSASFSTFKCYGVSPTKLNDLCFTNVYADSFVIRGDEVRQIAPGQTGKIADYNYKLPDDFTGCVIAWNSNNLDSKVGGNYNYLYRLFRKSNLKPFERDISTEIYQAGSTPCNGVEGFNCYFPLQSYGFQPTNGVGYQPYRVVVLSFELLHAPATVCGPKKSTPLVKNKCVNFNFNGLTGTGVLTESNKKFLPFQQFGRDIADITDAVRDPQTLEILDITPCSFGGVSVITPGTNTSNQVAVLYQDVNCTEVPVAIHADQLTPTWRVYSTGSNVFQTRAGCLIGAEHVNNSYECDIPIGAGICASYQTQTNSPSRAGSVASQSIIAYTMSLGAENSVAYSNNSIAIPTNFTISVTTEILPVSMTKTSVDCTMYICGDSTECSNLLLQYGSFCTQLNRALTGIAVEQDKNTQEVFAQVKQIYKTPPIKDFGGFNFSQILPDPSKPSKRSFIEDLLFNKVTLADAGFIKQYGDCLGDIAARDLICAQKFNGLTVLPPLLTDEMIAQYTSALLACTITSGWTCGAGPALQIPFAMQMAYRFNGIGVTQNVLYENQKLIANQFNSAIGKIQDSLSSTPSALGKLQDVVNQNAQALNTLVKQLSSNFGAISSVLNDILSRLDKVEAEVQIDRLITGRLQSLQTYVTQQLIRAAEIRASANLAATKMSECVLGQSKRVDFCGKGYHLMSFPQSAPHGVVFLHVTYVPAQEKNFTTAPAICHDGKAHFPREGVFVSNGTHWFVTQRNFYEPQIITTDNTFVSGNCDVVIGIVNNTVYDPLQPELDSFKEELDKYFKNHTSPDVDLGDISGINASVVNIQKEIDRLNEVAKNLNESLIDLQELGKYEQGSGYIPEAPRDGQAYVRKDGEWVLLSTFLGRSLEVLFQGPGSLPETGGGSDYKDDDDKGGGGSGGGGSGGGGSGGGGSGGGGSHHHHHH

SEQ ID NO: 100 - protein, 1297 aa, Artificial Sequence
  source: /note="Description of Artificial Sequence: Synthetic polypeptide"
MFVFLVLLPLVSSQCVNLTTRTQLPPAYTNSFTRGVYYPDKVFRSSVLHSTQDLFLPFFSNVTWFHAIHVSGTNGTKRFDNPVLPFNDGVYFASTEKSNIIRGWIFGTTLDSKTQSLLIVNNATNVVIKVCEFQFCNDPFLGVYYHKNNKSWMESEFRVYSSANNCTFEYVSQPFLMDLEGKQGNFKNLREFVFKNIDGYFKIYSKHTPINLVRDLPQGFSALEPLVDLPIGINITRFQTLLALHRSYLTPGDSSSGWTAGAAAYYVGYLQPRTFLLKYNENGTITDAVDCALDPLSETKCTLKSFTVEKGIYQTSNFRVQPTESIVRFPNITNLCPFGEVFNATRFASVYAWNRKRISNCVADYSVLYNSASFSTFKCYGVSPTKLNDLCFTNVYADSFVIRGDEVRQIAPGQTGKIADYNYKLPDDFTGCVIAWNSNNLDSKVGGNYNYLYRLFRKSNLKPFERDISTEIYQAGSTPCNGVEGFNCYFPLQSYGFQPTNGVGYQPYRVVVLSFELLHAPATVCGPKKSTPLVKNKCVNFNFNGLTGTGVLTESNKKFLPFQQFGRDIADITDAVRDPQTLEILDITPCSFGGVSVITPGTNTSNQVAVLYQDVNCTEVPVAIHADQLTPTWRVYSTGSNVFQTRAGCLIGAEHVNNSYECDIPIGAGICASYQTQTNSPSRAGSVASQSIIAYTMSLGAENSVAYSNNSIAIPTNFTISVTTEILPVSMTKTSVDCTMYICGDSTECSNLLLQYGSFCTQLNRALTGIAVEQDKNTQEVFAQVKQIYKTPPIKDFGGFNFSQILPDPSKPSKRSFIEDLLFNKVTLADAGFIKQYGDCLGDIAARDLICAQKFNGLTVLPPLLTDEMIAQYTSALLAGTITCGWTFGAGPCLQIPFAMQMAYRFNGIGVTQNVLYENQKLIANQFNSAIGKIQDSLSSTPSALGKLQDVVNQNAQALNTLVKQLSSNFGAISSVLNDILSRLDKVEAEVQIDRLITGRLQSLQTYVTQQLIRAAEIRASANLAATKMSECVLGQSKRVDFCGKGYHLMSFPQSAPHGVVFLHVTYVPAQEKNFTTAPAICHDGKAHFPREGVFVSNGTHWFVTQRNFYEPQIITTDNTFVSGNCDVVIGIVNNTVYDPLQPELDSFKEELDKYFKNHTSPDVDLGDISGINASVVNIQKEIDRLNEVAKNLNESLIDLQELGKYEQGSGYIPEAPRDGQAYVRKDGEWVLLSTFLGRSLEVLFQGPGSLPETGGGSDYKDDDDKGGGGSGGGGSGGGGSGGGGSGGGGSHHHHHH

SEQ ID NO: 101 - protein, 1297 aa, Artificial Sequence
  source: /note="Description of Artificial Sequence: Synthetic polypeptide"
MFVFLVLLPLVSSQCVNLTTRTQLPPAYTNSFTRGVYYPDKVFRSSVLHSTQDLFLPFFSNVTWFHAIHVSGTNGTKRFDNPVLPFNDGVYFASTEKSNIIRGWIFGTTLDSKTQSLLIVNNATNVVIKVCEFQFCNDPFLGVYYHKNNKSWMESEFRVYSSANNCTFEYVSQPFLMDLEGKQGNFKNLREFVFKNIDGYFKIYSKHTPINLVRDLPQGFSALEPLVDLPIGINITRFQTLLALHRSYLTPGDSSSGWTAGAAAYYVGYLQPRTFLLKYNENGTITDAVDCALDPLSETKCTLKSFTVEKGIYQTSNFRVQPTESIVRFPNITNLCPFGEVFNATRFASVYAWNRKRISNCVADYSVLYNSASFSTFKCYGVSPTKLNDLCFTNVYADSFVIRGDEVRQIAPGQTGKIADYNYKLPDDFTGCVIAWNSNNLDSKVGGNYNYLYRLFRKSNLKPFERDISTEIYQAGSTPCNGVEGFNCYFPLQSYGFQPTNGVGYQPYRVVVLSFELLHAPATVCGPKKSTPLVKNKCVNFNFNGLTGTGVLTESNKKFLPFQQFGRDIADITDAVRDPQTLEILDITPCSFGGVSVITPGTNTSNQVAVLYQNVNCTEVPVAIHADQLTPTWRVYSTGSNVFQTRAGCLIGAEHVNNSYECDIPIGAGICASYQTQTNSPSRAGSVASQSIIAYTMSLGAENSVAYSNNSIAIPTNFTISVTTEILPVSMTKTSVDCTMYICGDSTECSNLLLQYGSFCTQLNRALTGIAVEQDKNTQEVFAQVKQIYKTPPIKDFGGFNFSQILPDPSKPSKRSFIEDLLFNKVTLADAGFIKQYGDCLGDIAARDLICAQKFNGLTVLPPLLTDEMIAQYTSALLACTITSGWTCGAGAALQIPFAMQMAYRFNGIGVTQNVLYENQKLIANQFNSAIGKIQDSLSSTPSALGKLQDVVNQNAQALNTLVKQLSSNFGAISSVLNDILSRLDKVEAEVQIDRLITGRLQSLQTYVTQQLIRAAEIRASANLAATKMSECVLGQSKRVDFCGKGYHLMSFPQSAPHGVVFLHVTYVPAQEKNFTTAPAICHDGKAHFPREGVFVSNGTHWFVTQRNFYEPQIITTDNTFVSGNCDVVIGIVNNTVYDPLQPELDSFKEELDKYFKNHTSPDVDLGDISGINASVVNIQKEIDRLNEVAKNLNESLIDLQELGKYEQGSGYIPEAPRDGQAYVRKDGEWVLLSTFLGRSLEVLFQGPGSLPETGGGSDYKDDDDKGGGGSGGGGSGGGGSGGGGSGGGGSHHHHHH

SEQ ID NO: 102 - protein, 1297 aa, Artificial Sequence
  source: /note="Description of Artificial Sequence: Synthetic polypeptide"
MFVFLVLLPLVSSQCVNLTTRTQLPPAYTNSFTRGVYYPDKVFRSSVLHSTQDLFLPFFSNVTWFHAIHVSGTNGTKRFDNPVLPFNDGVYFASTEKSNIIRGWIFGTTLDSKTQSLLIVNNATNVVIKVCEFQFCNDPFLGVYYHKNNKSWMESEFRVYSSANNCTFEYVSQPFLMDLEGKQGNFKNLREFVFKNIDGYFKIYSKHTPINLVRDLPQGFSALEPLVDLPIGINITRFQTLLALHRSYLTPGDSSSGWTAGAAAYYVGYLQPRTFLLKYNENGTITDAVDCALDPLSETKCTLKSFTVEKGIYQTSNFRVQPTESIVRFPNITNLCPFGEVFNATRFASVYAWNRKRISNCVADYSVLYNSASFSTFKCYGVSPTKLNDLCFTNVYADSFVIRGDEVRQIAPGQTGKIADYNYKLPDDFTGCVIAWNSNNLDSKVGGNYNYLYRLFRKSNLKPFERDISTEIYQAGSTPCNGVEGFNCYFPLQSYGFQPTNGVGYQPYRVVVLSFELLHAPATVCGPKKSTPLVKNKCVNFNFNGLTGTGVLTESNKKFLPFQQFGRDIADITDAVRDPQTLEILDITPCSFGGVSVITPGTNTSNQVAVLYQNVNCTEVPVAIHADQLTPTWRVYSTGSNVFQTRAGCLIGAEHVNNSYECDIPIGAGICASYQTQTNSPSRAGSVASQSIIAYTMSLGAENSVAYSNNSIAIPTNFTISVTTEILPVSMTKTSVDCTMYICGDSTECSNLLLQYGSFCTQLNRALTGIAVEQDKNTQEVFAQVKQIYKTPPIKDFGGFNFSQILPDPSKPSKRSFIEDLLFNKVTLADAGFIKQYGDCLGDIAARDLICAQKFNGLTVLPPLLTDEMIAQYTSALLAGTITCGWTFGAGACLQIPFAMQMAYRFNGIGVTQNVLYENQKLIANQFNSAIGKIQDSLSSTPSALGKLQDVVNQNAQALNTLVKQLSSNFGAISSVLNDILSRLDKVEAEVQIDRLITGRLQSLQTYVTQQLIRAAEIRASANLAATKMSECVLGQSKRVDFCGKGYHLMSFPQSAPHGVVFLHVTYVPAQEKNFTTAPAICHDGKAHFPREGVFVSNGTHWFVTQRNFYEPQIITTDNTFVSGNCDVVIGIVNNTVYDPLQPELDSFKEELDKYFKNHTSPDVDLGDISGINASVVNIQKEIDRLNEVAKNLNESLIDLQELGKYEQGSGYIPEAPRDGQAYVRKDGEWVLLSTFLGRSLEVLFQGPGSLPETGGGSDYKDDDDKGGGGSGGGGSGGGGSGGGGSGGGGSHHHHHH

SEQ ID NO: 103 - protein, 1297 aa, Artificial Sequence
  source: /note="Description of Artificial Sequence: Synthetic polypeptide"
MFVFLVLLPLVSSQCVNLTTRTQLPPAYTNSFTRGVYYPDKVFRSSVLHSTQDLFLPFFSNVTWFHAIHVSGTNGTKRFDNPVLPFNDGVYFASTEKSNIIRGWIFGTTLDSKTQSLLIVNNATNVVIKVCEFQFCNDPFLGVYYHKNNKSWMESEFRVYSSANNCTFEYVSQPFLMDLEGKQGNFKNLREFVFKNIDGYFKIYSKHTPINLVRDLPQGFSALEPLVDLPIGINITRFQTLLALHRSYLTPGDSSSGWTAGAAAYYVGYLQPRTFLLKYNENGTITDAVDCALDPLSETKCTLKSFTVEKGIYQTSNFRVQPTESIVRFPNITNLCPFGEVFNATRFASVYAWNRKRISNCVADYSVLYNSASFSTFKCYGVSPTKLNDLCFTNVYADSFVIRGDEVRQIAPGQTGKIADYNYKLPDDFTGCVIAWNSNNLDSKVGGNYNYLYRLFRKSNLKPFERDISTEIYQAGSTPCNGVEGFNCYFPLQSYGFQPTNGVGYQPYRVVVLSFELLHAPATVCGPKKSTPLVKNKCVNFNFNGLTGTGVLTESNKKFLPFQQFGRDIADITDAVRDPQTLEILDITPCSFGGVSVITPGTNTSNQVAVLYQNVNCTEVPVAIHADQLTPTWRVYSTGSNVFQTRAGCLIGAEHVNNSYECDIPIGAGICASYQTQTNSPSRAGSVASQSIIAYTMSLGAENSVAYSNNSIAIPTNFTISVTTEILPVSMTKTSVDCTMYICGDSTECSNLLLQYGSFCTQLNRALTGIAVEQDKNTQEVFAQVKQIYKTPPIKDFGGFNFSQILPDPSKPSKRSFIEDLLFNKVTLADAGFIKQYGDCLGDIAARDLICAQKFNGLTVLPPLLTDEMIAQYTSALLACTITSGWTCGAGPALQIPFAMQMAYRFNGIGVTQNVLYENQKLIANQFNSAIGKIQDSLSSTASALGKLQDVVNQNAQALNTLVKQLSSNFGAISSVLNDILSRLDKVEAEVQIDRLITGRLQSLQTYVTQQLIRAAEIRASANLAATKMSECVLGQSKRVDFCGKGYHLMSFPQSAPHGVVFLHVTYVPAQEKNFTTAPAICHDGKAHFPREGVFVSNGTHWFVTQRNFYEPQIITTDNTFVSGNCDVVIGIVNNTVYDPLQPELDSFKEELDKYFKNHTSPDVDLGDISGINASVVNIQKEIDRLNEVAKNLNESLIDLQELGKYEQGSGYIPEAPRDGQAYVRKDGEWVLLSTFLGRSLEVLFQGPGSLPETGGGSDYKDDDDKGGGGSGGGGSGGGGSGGGGSGGGGSHHHHHH

SEQ ID NO: 104 - protein, 1297 aa, Artificial Sequence
  source: /note="Description of Artificial Sequence: Synthetic polypeptide"
MFVFLVLLPLVSSQCVNLTTRTQLPPAYTNSFTRGVYYPDKVFRSSVLHSTQDLFLPFFSNVTWFHAIHVSGTNGTKRFDNPVLPFNDGVYFASTEKSNIIRGWIFGTTLDSKTQSLLIVNNATNVVIKVCEFQFCNDPFLGVYYHKNNKSWMESEFRVYSSANNCTFEYVSQPFLMDLEGKQGNFKNLREFVFKNIDGYFKIYSKHTPINLVRDLPQGFSALEPLVDLPIGINITRFQTLLALHRSYLTPGDSSSGWTAGAAAYYVGYLQPRTFLLKYNENGTITDAVDCALDPLSETKCTLKSFTVEKGIYQTSNFRVQPTESIVRFPNITNLCPFGEVFNATRFASVYAWNRKRISNCVADYSVLYNSASFSTFKCYGVSPTKLNDLCFTNVYADSFVIRGDEVRQIAPGQTGKIADYNYKLPDDFTGCVIAWNSNNLDSKVGGNYNYLYRLFRKSNLKPFERDISTEIYQAGSTPCNGVEGFNCYFPLQSYGFQPTNGVGYQPYRVVVLSFELLHAPATVCGPKKSTPLVKNKCVNFNFNGLTGTGVLTESNKKFLPFQQFGRDIADITDAVRDPQTLEILDITPCSFGGVSVITPGTNTSNQVAVLYQNVNCTEVPVAIHADQLTPTWRVYSTGSNVFQTRAGCLIGAEHVNNSYECDIPIGAGICASYQTQTNSPSRAGSVASQSIIAYTMSLGAENSVAYSNNSIAIPTNFTISVTTEILPVSMTKTSVDCTMYICGDSTECSNLLLQYGSFCTQLNRALTGIAVEQDKNTQEVFAQVKQIYKTPPIKDFGGFNFSQILPDPSKPSKRSFIEDLLFNKVTLADAGFIKQYGDCLGDIAARDLICAQKFNGLTVLPPLLTDEMIAQYTSALLAGTITCGWTFGAGPCLQIPFAMQMAYRFNGIGVTQNVLYENQKLIANQFNSAIGKIQDSLSSTASALGKLQDVVNQNAQALNTLVKQLSSNFGAISSVLNDILSRLDKVEAEVQIDRLITGRLQSLQTYVTQQLIRAAEIRASANLAATKMSECVLGQSKRVDFCGKGYHLMSFPQSAPHGVVFLHVTYVPAQEKNFTTAPAICHDGKAHFPREGVFVSNGTHWFVTQRNFYEPQIITTDNTFVSGNCDVVIGIVNNTVYDPLQPELDSFKEELDKYFKNHTSPDVDLGDISGINASVVNIQKEIDRLNEVAKNLNESLIDLQELGKYEQGSGYIPEAPRDGQAYVRKDGEWVLLSTFLGRSLEVLFQGPGSLPETGGGSDYKDDDDKGGGGSGGGGSGGGGSGGGGSGGGGSHHHHHH

SEQ ID NO: 105 - protein, 1297 aa, Artificial Sequence
  source: /note="Description of Artificial Sequence: Synthetic polypeptide"
MFVFLVLLPLVSSQCVNLTTRTQLPPAYTNSFTRGVYYPDKVFRSSVLHSTQDLFLPFFSNVTWFHAIHVSGTNGTKRFDNPVLPFNDGVYFASTEKSNIIRGWIFGTTLDSKTQSLLIVNNATNVVIKVCEFQFCNDPFLGVYYHKNNKSWMESEFRVYSSANNCTFEYVSQPFLMDLEGKQGNFKNLREFVFKNIDGYFKIYSKHTPINLVRDLPQGFSALEPLVDLPIGINITRFQTLLALHRSYLTPGDSSSGWTAGAAAYYVGYLQPRTFLLKYNENGTITDAVDCALDPLSETKCTLKSFTVEKGIYQTSNFRVQPTESIVRFPNITNLCPFGEVFNATRFASVYAWNRKRISNCVADYSVLYNSASFSTFKCYGVSPTKLNDLCFTNVYADSFVIRGDEVRQIAPGQTGKIADYNYKLPDDFTGCVIAWNSNNLDSKVGGNYNYLYRLFRKSNLKPFERDISTEIYQAGSTPCNGVEGFNCYFPLQSYGFQPTNGVGYQPYRVVVLSFELLHAPATVCGPKKSTPLVKNKCVNFNFNGLTGTGVLTESNKKFLPFQQFGRDIADITDAVRDPQTLEILDITPCSFGGVSVITPGTNTSNQVAVLYQNVNCTEVPVAIHADQLTPTWRVYSTGSNVFQTRAGCLIGAEHVNNSYECDIPIGAGICASYQTQTNSPSRAGSVASQSIIAYTMSLGAENSVAYSNNSIAIPTNFTISVTTEILPVSMTKTSVDCTMYICGDSTECSNLLLQYGSFCTQLNRALTGIAVEQDKNTQEVFAQVKQIYKTPPIKDFGGFNFSQILPDPSKPSKRSFIEDLLFNKVTLADAGFIKQYGDCLGDIAARDLICAQKFNGLTVLPPLLTDEMIAQYTSALLACTITSGWTCGAGPALQIPFAMQMAYRFNGIGVTQNVLYENQKLIANQFNSAIGKIQDSLSSTPSALGKLQDVVNQNAQALNTLVKQLSSNFGAISSVLNDILSRLDKVEAEVQIDRLITGRLQSLQTYVTQQLIRAAEIRASANLAATKMSECVLGQSKRVDFCGKGYHLMSFPQSAPHGVVFLHVTYVPAQEKNFTTAPAICHDGKAHFPREGVFVSNGTHWFVTQRNFYEPQIITTDNTFVSGNCDVVIGIVNNTVYDPLQPELDSFKEELDKYFKNHTSPDVDLGDISGINASVVNIQKEIDRLNEVAKNLNESLIDLQELGKYEQGSGYIPEAPRDGQAYVRKDGEWVLLSTFLGRSLEVLFQGPGSLPETGGGSDYKDDDDKGGGGSGGGGSGGGGSGGGGSGGGGSHHHHHH

SEQ ID NO: 106 - protein, 1297 aa, Artificial Sequence
  source: /note="Description of Artificial Sequence: Synthetic polypeptide"
MFVFLVLLPLVSSQCVNLTTRTQLPPAYTNSFTRGVYYPDKVFRSSVLHSTQDLFLPFFSNVTWFHAIHVSGTNGTKRFDNPVLPFNDGVYFASTEKSNIIRGWIFGTTLDSKTQSLLIVNNATNVVIKVCEFQFCNDPFLGVYYHKNNKSWMESEFRVYSSANNCTFEYVSQPFLMDLEGKQGNFKNLREFVFKNIDGYFKIYSKHTPINLVRDLPQGFSALEPLVDLPIGINITRFQTLLALHRSYLTPGDSSSGWTAGAAAYYVGYLQPRTFLLKYNENGTITDAVDCALDPLSETKCTLKSFTVEKGIYQTSNFRVQPTESIVRFPNITNLCPFGEVFNATRFASVYAWNRKRISNCVADYSVLYNSASFSTFKCYGVSPTKLNDLCFTNVYADSFVIRGDEVRQIAPGQTGKIADYNYKLPDDFTGCVIAWNSNNLDSKVGGNYNYLYRLFRKSNLKPFERDISTEIYQAGSTPCNGVEGFNCYFPLQSYGFQPTNGVGYQPYRVVVLSFELLHAPATVCGPKKSTPLVKNKCVNFNFNGLTGTGVLTESNKKFLPFQQFGRDIADITDAVRDPQTLEILDITPCSFGGVSVITPGTNTSNQVAVLYQNVNCTEVPVAIHADQLTPTWRVYSTGSNVFQTRAGCLIGAEHVNNSYECDIPIGAGICASYQTQTNSPSRAGSVASQSIIAYTMSLGAENSVAYSNNSIAIPTNFTISVTTEILPVSMTKTSVDCTMYICGDSTECSNLLLQYGSFCTQLNRALTGIAVEQDKNTQEVFAQVKQIYKTPPIKDFGGFNFSQILPDPSKPSKRSFIEDLLFNKVTLADAGFIKQYGDCLGDIAARDLICAQKFNGLTVLPPLLTDEMIAQYTSALLAGTITCGWTFGAGPCLQIPFAMQMAYRFNGIGVTQNVLYENQKLIANQFNSAIGKIQDSLSSTPSALGKLQDVVNQNAQALNTLVKQLSSNFGAISSVLNDILSRLDKVEAEVQIDRLITGRLQSLQTYVTQQLIRAAEIRASANLAATKMSECVLGQSKRVDFCGKGYHLMSFPQSAPHGVVFLHVTYVPAQEKNFTTAPAICHDGKAHFPREGVFVSNGTHWFVTQRNFYEPQIITTDNTFVSGNCDVVIGIVNNTVYDPLQPELDSFKEELDKYFKNHTSPDVDLGDISGINASVVNIQKEIDRLNEVAKNLNESLIDLQELGKYEQGSGYIPEAPRDGQAYVRKDGEWVLLSTFLGRSLEVLFQGPGSLPETGGGSDYKDDDDKGGGGSGGGGSGGGGSGGGGSGGGGSHHHHHH

SEQ ID NO: 107 - protein, 1297 aa, Artificial Sequence
  source: /note="Description of Artificial Sequence: Synthetic polypeptide"
MFVFLVLLPLVSSQCVNLTTRTQLPPAYTNSFTRGVYYPDKVFRSSVLHSTQDLFLPFFSNVTWFHAIHVSGTNGTKRFDNPVLPFNDGVYFASTEKSNIIRGWIFGTTLDSKTQSLLIVNNATNVVIKVCEFQFCNDPFLGVYYHKNNKSWMESEFRVYSSANNCTFEYVSQPFLMDLEGKQGNFKNLREFVFKNIDGYFKIYSKHTPINLVRDLPQGFSALEPLVDLPIGINITRFQTLLALHRSYLTPGDSSSGWTAGAAAYYVGYLQPRTFLLKYNENGTITDAVDCALDPLSETKCTLKSFTVEKGIYQTSNFRVQPTESIVRFPNITNLCPFGEVFNATRFASVYAWNRKRISNCVADYSVLYNSASFSTFKCYGVSPTKLNDLCFTNVYADSFVIRGDEVRQIAPGQTGKIADYNYKLPDDFTGCVIAWNSNNLDSKVGGNYNYLYRLFRKSNLKPFERDISTEIYQAGSTPCNGVEGFNCYFPLQSYGFQPTNGVGYQPYRVVVLSFELLHAPATVCGPKKSTNLVKNKCVNFNFNGLTGTGVLTESNKKFLPFQQFGRDIADTTDAVRDPQTLEILDITPCSFGGVSVITPGTNTSNQVAVLYQDVNCTEVPVAIHADQLTPTWRVYSTGSNVFQTRAGCLIGAEHVNNSYECDIPIGAGICASYQTQTNSPSRAGSVASQSIIAYTMSLGAENSVAYSNNSIAIPTNFTISVTTEILPVSMTKTSVDCTMYICGDSTECSNLLLQYGSFCTQLNRALTGIAVEQDKNTQEVFAQVKQIYKTPPIKDFGGFNFSQILPDPSKPSKRSFIEDLLFNKVTLADAGFIKQYGDCLGDIAARDLICAQKFNGLTVLPPLLTDEMIAQYTSALLAGTITSGWTFGAGPALQIPFAMQMAYRFNGIGVTQNVLYENQKLIANQFNSAIGKIQDSLSSTPSALGKLQDVVNQNAQALNTLVKQLSSNFGAISSVLNDILSRLDPPEAEVQIDRLITGRLQSLQTYVTQQLIRAAEIRASANLAATKMSECVLGQSKRVDFCGKGYHLMSFPQSAPHGVVFLHVTYVPAQEKNFTTAPAICHDGKAHFPREGVFVSNGTHWFVTQRNFYEPQIITTDNTFVSGNCDVVIGIVNNTVYDPLQPELDSFKEELDKYFKNHTSPDVDLGDISGINASVVNIQKEIDRLNEVAKNLNESLIDLQELGKYEQGSGYIPEAPRDGQAYVRKDGEWVLLSTFLGRSLEVLFQGPGSLPETGGGSDYKDDDDKGGGGSGGGGSGGGGSGGGGSGGGGSHHHHHH

SEQ ID NO: 108 - protein, 1297 aa, Artificial Sequence
  source: /note="Description of Artificial Sequence: Synthetic polypeptide"
MFVFLVLLPLVSSQCVNLTTRTQLPPAYTNSFTRGVYYPDKVFRSSVLHSTQDLFLPFFSNVTWFHAIHVSGTNGTKRFDNPVLPFNDGVYFASTEKSNIIRGWIFGTTLDSKTQSLLIVNNATNVVIKVCEFQFCNDPFLGVYYHKNNKSWMESEFRVYSSANNCTFEYVSQPFLMDLEGKQGNFKNLREFVFKNIDGYFKIYSKHTPINLVRDLPQGFSALEPLVDLPIGINITRFQTLLALHRSYLTPGDSSSGWTAGAAAYYVGYLQPRTFLLKYNENGTITDAVDCALDPLSETKCTLKSFTVEKGIYQTSNFRVQPTESIVRFPNITNLCPFGEVFNATRFASVYAWNRKRISNCVADYSVLYNSASFSTFKCYGVSPTKLNDLCFTNVYADSFVIRGDEVRQIAPGQTGKIADYNYKLPDDFTGCVIAWNSNNLDSKVGGNYNYLYRLFRKSNLKPFERDISTEIYQAGSTPCNGVEGFNCYFPLQSYGFQPTNGVGYQPYRVVVLSFELLHAPATVCGPKKSTNLVKNKCVNFNFNGLTGTGVLTESNKKFLPFQQFGRDIADTTDAVRDPQTLEILDITPCSFGGVSVITPGTNTSNQVAVLYQNVNCTEVPVAIHADQLTPTWRVYSTGSNVFQTRAGCLIGAEHVNNSYECDIPIGAGICASYQTQTNSPSRAGSVASQSIIAYTMSLGAENSVAYSNNSIAIPTNFTISVTTEILPVSMTKTSVDCTMYICGDSTECSNLLLQYGSFCTQLNRALTGIAVEQDKNTQEVFAQVKQIYKTPPIKDFGGFNFSQILPDPSKPSKRSFIEDLLFNKVTLADAGFIKQYGDCLGDIAARDLICAQKFNGLTVLPPLLTDEMIAQYTSALLAGTITSGWTFGAGAALQIPFAMQMAYRFNGIGVTQNVLYENQKLIANQFNSAIGKIQDSLSSTPSALGKLQDVVNQNAQALNTLVKQLSSNFGAISSVLNDILSRLDPPEAEVQIDRLITGRLQSLQTYVTQQLIRAAEIRASANLAATKMSECVLGQSKRVDFCGKGYHLMSFPQSAPHGVVFLHVTYVPAQEKNFTTAPAICHDGKAHFPREGVFVSNGTHWFVTQRNFYEPQIITTDNTFVSGNCDVVIGIVNNTVYDPLQPELDSFKEELDKYFKNHTSPDVDLGDISGINASVVNIQKEIDRLNEVAKNLNESLIDLQELGKYEQGSGYIPEAPRDGQAYVRKDGEWVLLSTFLGRSLEVLFQGPGSLPETGGGSDYKDDDDKGGGGSGGGGSGGGGSGGGGSGGGGSHHHHHH

SEQ ID NO: 109 - protein, 1297 aa, Artificial Sequence
  source: /note="Description of Artificial Sequence: Synthetic polypeptide"
MFVFLVLLPLVSSQCVNLTTRTQLPPAYTNSFTRGVYYPDKVFRSSVLHSTQDLFLPFFSNVTWFHAIHVSGTNGTKRFDNPVLPFNDGVYFASTEKSNIIRGWIFGTTLDSKTQSLLIVNNATNVVIKVCEFQFCNDPFLGVYYHKNNKSWMESEFRVYSSANNCTFEYVSQPFLMDLEGKQGNFKNLREFVFKNIDGYFKIYSKHTPINLVRDLPQGFSALEPLVDLPIGINITRFQTLLALHRSYLTPGDSSSGWTAGAAAYYVGYLQPRTFLLKYNENGTITDAVDCALDPLSETKCTLKSFTVEKGIYQTSNFRVQPTESIVRFPNITNLCPFGEVFNATRFASVYAWNRKRISNCVADYSVLYNSASFSTFKCYGVSPTKLNDLCFTNVYADSFVIRGDEVRQIAPGQTGKIADYNYKLPDDFTGCVIAWNSNNLDSKVGGNYNYLYRLFRKSNLKPFERDISTEIYQAGSTPCNGVEGFNCYFPLQSYGFQPTNGVGYQPYRVVVLSFELLHAPATVCGPKKSTNLVKNKCVNFNFNGLTGTGVLTESNKKFLPFQQFGRDIADITDAVRDPQTLEILDITPCSFGGVSVITPGTNTSNQVAVLYQDVNCTEVPVAIHADQLTPTWRVYSTGSNVFQTRAGCLIGAEHVNNSYECDIPIGAGICASYQTQTNSPSRAGSVASQSIIAYTMSLGAENSVAYSNNSIAIPTNFTISVTTEILPVSMTKTSVDCTMYICGDSTECSNLLLQYGSFCTQLNRALTGIAVEQDKNTQEVFAQVKQIYKTPPIKDFGGFNFSQILPDPSKPSKRSFIEDLLFNKVTLADAGFIKQYGDCLGDIAARDLICAQKFNGLTVLPPLLTDEMIAQYTSALLAGTITSGWTFGAGAALQIPFAMQMAYRFNGIGVTQNVLYENQKLIANQFNSAIGKIQDSLSSTPSALGKLQDVVNQNAQALNTLVKQLSSNFGAISSVLNDILSRLDPPEAEVQIDRLITGRLQSLQTYVTQQLIRAAEIRASANLAATKMSECVLGQSKRVDFCGKGYHLMSFPQSAPHGVVFLHVTYVPAQEKNFTTAPAICHDGKAHFPREGVFVSNGTHWFVTQRNFYEPQIITTDNTFVSGNCDVVIGIVNNTVYDPLQPELDSFKEELDKYFKNHTSPDVDLGDISGINASVVNIQKEIDRLNEVAKNLNESLIDLQELGKYEQGSGYIPEAPRDGQAYVRKDGEWVLLSTFLGRSLEVLFQGPGSLPETGGGSDYKDDDDKGGGGSGGGGSGGGGSGGGGSGGGGSHHHHHH

SEQ ID NO: 110 - protein, 1297 aa, Artificial Sequence
  source: /note="Description of Artificial Sequence: Synthetic polypeptide"
MFVFLVLLPLVSSQCVNLTTRTQLPPAYTNSFTRGVYYPDKVFRSSVLHSTQDLFLPFFSNVTWFHAIHVSGTNGTKRFDNPVLPFNDGVYFASTEKSNIIRGWIFGTTLDSKTQSLLIVNNATNVVIKVCEFQFCNDPFLGVYYHKNNKSWMESEFRVYSSANNCTFEYVSQPFLMDLEGKQGNFKNLREFVFKNIDGYFKIYSKHTPINLVRDLPQGFSALEPLVDLPIGINITRFQTLLALHRSYLTPGDSSSGWTAGAAAYYVGYLQPRTFLLKYNENGTITDAVDCALDPLSETKCTLKSFTVEKGIYQTSNFRVQPTESIVRFPNITNLCPFGEVFNATRFASVYAWNRKRISNCVADYSVLYNSASFSTFKCYGVSPTKLNDLCFTNVYADSFVIRGDEVRQIAPGQTGKIADYNYKLPDDFTGCVIAWNSNNLDSKVGGNYNYLYRLFRKSNLKPFERDISTEIYQAGSTPCNGVEGFNCYFPLQSYGFQPTNGVGYQPYRVVVLSFELLHAPATVCGPKKSTPLVKNKCVNFNFNGLTGTGVLTESNKKFLPFQQFGRDIADTTDAVRDPQTLEILDITPCSFGGVSVITPGTNTSNQVAVLYQDVNCTEVPVAIHADQLTPTWRVYSTGSNVFQTRAGCLIGAEHVNNSYECDIPIGAGICASYQTQTNSPSRAGSVASQSIIAYTMSLGAENSVAYSNNSIAIPTNFTISVTTEILPVSMTKTSVDCTMYICGDSTECSNLLLQYGSFCTQLNRALTGIAVEQDKNTQEVFAQVKQIYKTPPIKDFGGFNFSQILPDPSKPSKRSFIEDLLFNKVTLADAGFIKQYGDCLGDIAARDLICAQKFNGLTVLPPLLTDEMIAQYTSALLAGTITSGWTFGAGAALQIPFAMQMAYRFNGIGVTQNVLYENQKLIANQFNSAIGKIQDSLSSTPSALGKLQDVVNQNAQALNTLVKQLSSNFGAISSVLNDILSRLDPPEAEVQIDRLITGRLQSLQTYVTQQLIRAAEIRASANLAATKMSECVLGQSKRVDFCGKGYHLMSFPQSAPHGVVFLHVTYVPAQEKNFTTAPAICHDGKAHFPREGVFVSNGTHWFVTQRNFYEPQIITTDNTFVSGNCDVVIGIVNNTVYDPLQPELDSFKEELDKYFKNHTSPDVDLGDISGINASVVNIQKEIDRLNEVAKNLNESLIDLQELGKYEQGSGYIPEAPRDGQAYVRKDGEWVLLSTFLGRSLEVLFQGPGSLPETGGGSDYKDDDDKGGGGSGGGGSGGGGSGGGGSGGGGSHHHHHH

SEQ ID NO: 111 - protein, 1297 aa, Artificial Sequence
  source: /note="Description of Artificial Sequence: Synthetic polypeptide"
MFVFLVLLPLVSSQCVNLTTRTQLPPAYTNSFTRGVYYPDKVFRSSVLHSTQDLFLPFFSNVTWFHAIHVSGTNGTKRFDNPVLPFNDGVYFASTEKSNIIRGWIFGTTLDSKTQSLLIVNNATNVVIKVCEFQFCNDPFLGVYYHKNNKSWMESEFRVYSSANNCTFEYVSQPFLMDLEGKQGNFKNLREFVFKNIDGYFKIYSKHTPINLVRDLPQGFSALEPLVDLPIGINITRFQTLLALHRSYLTPGDSSSGWTAGAAAYYVGYLQPRTFLLKYNENGTITDAVDCALDPLSETKCTLKSFTVEKGIYQTSNFRVQPTESIVRFPNITNLCPFGEVFNATRFASVYAWNRKRISNCVADYSVLYNSASFSTFKCYGVSPTKLNDLCFTNVYADSFVIRGDEVRQIAPGQTGKIADYNYKLPDDFTGCVIAWNSNNLDSKVGGNYNYLYRLFRKSNLKPFERDISTEIYQAGSTPCNGVEGFNCYFPLQSYGFQPTNGVGYQPYRVVVLSFELLHAPATVCGPKKSTNLVKNKCVNFNFNGLTGTGVLTESNKKFLPFQQFGRDIADTTDAVRDPQTLEILDITPCSFGGVSVITPGTNTSNQVAVLYQDVNCTEVPVAIHADQLTPTWRVYSTGSNVFQTRAGCLIGAEHVNNSYECDIPIGAGICASYQTQTNSPSRAGSVASQSIIAYTMSLGAENSVAYSNNSIAIPTNFTISVTTEILPVSMTKTSVDCTMYICGDSTECSNLLLQYGSFCTQLNRALTGIAVEQDKNTQEVFAQVKQIYKTPPIKDFGGFNFSQILPDPSKPSKRSFIEDLLFNKVTLADAGFIKQYGDCLGDIAARDLICAQKFNGLTVLPPLLTDEMIAQYTSALLACTITSGWTCGAGAALQIPFAMQMAYRFNGIGVTQNVLYENQKLIANQFNSAIGKIQDSLSSTPSALGKLQDVVNQNAQALNTLVKQLSSNFGAISSVLNDILSRLDPPEAEVQIDRLITGRLQSLQTYVTQQLIRAAEIRASANLAATKMSECVLGQSKRVDFCGKGYHLMSFPQSAPHGVVFLHVTYVPAQEKNFTTAPAICHDGKAHFPREGVFVSNGTHWFVTQRNFYEPQIITTDNTFVSGNCDVVIGIVNNTVYDPLQPELDSFKEELDKYFKNHTSPDVDLGDISGINASVVNIQKEIDRLNEVAKNLNESLIDLQELGKYEQGSGYIPEAPRDGQAYVRKDGEWVLLSTFLGRSLEVLFQGPGSLPETGGGSDYKDDDDKGGGGSGGGGSGGGGSGGGGSGGGGSHHHHHH

SEQ ID NO: 112 - protein, 1297 aa, Artificial Sequence
  source: /note="Description of Artificial Sequence: Synthetic polypeptide"
MFVFLVLLPLVSSQCVNLTTRTQLPPAYTNSFTRGVYYPDKVFRSSVLHSTQDLFLPFFSNVTWFHAIHVSGTNGTKRFDNPVLPFNDGVYFASTEKSNIIRGWIFGTTLDSKTQSLLIVNNATNVVIKVCEFQFCNDPFLGVYYHKNNKSWMESEFRVYSSANNCTFEYVSQPFLMDLEGKQGNFKNLREFVFKNIDGYFKIYSKHTPINLVRDLPQGFSALEPLVDLPIGINITRFQTLLALHRSYLTPGDSSSGWTAGAAAYYVGYLQPRTFLLKYNENGTITDAVDCALDPLSETKCTLKSFTVEKGIYQTSNFRVQPTESIVRFPNITNLCPFGEVFNATRFASVYAWNRKRISNCVADYSVLYNSASFSTFKCYGVSPTKLNDLCFTNVYADSFVIRGDEVRQIAPGQTGKIADYNYKLPDDFTGCVIAWNSNNLDSKVGGNYNYLYRLFRKSNLKPFERDISTEIYQAGSTPCNGVEGFNCYFPLQSYGFQPTNGVGYQPYRVVVLSFELLHAPATVCGPKKSTNLVKNKCVNFNFNGLTGTGVLTESNKKFLPFQQFGRDIADTTDAVRDPQTLEILDITPCSFGGVSVITPGTNTSNQVAVLYQDVNCTEVPVAIHADQLTPTWRVYSTGSNVFQTRAGCLIGAEHVNNSYECDIPIGAGICASYQTQTNSPSRAGSVASQSIIAYTMSLGAENSVAYSNNSIAIPTNFTISVTTEILPVSMTKTSVDCTMYICGDSTECSNLLLQYGSFCTQLNRALTGIAVEQDKNTQEVFAQVKQIYKTPPIKDFGGFNFSQILPDPSKPSKRSFIEDLLFNKVTLADAGFIKQYGDCLGDIAARDLICAQKFNGLTVLPPLLTDEMIAQYTSALLAGTITCGWTFGAGACLQIPFAMQMAYRFNGIGVTQNVLYENQKLIANQFNSAIGKIQDSLSSTPSALGKLQDVVNQNAQALNTLVKQLSSNFGAISSVLNDILSRLDPPEAEVQIDRLITGRLQSLQTYVTQQLIRAAEIRASANLAATKMSECVLGQSKRVDFCGKGYHLMSFPQSAPHGVVFLHVTYVPAQEKNFTTAPAICHDGKAHFPREGVFVSNGTHWFVTQRNFYEPQIITTDNTFVSGNCDVVIGIVNNTVYDPLQPELDSFKEELDKYFKNHTSPDVDLGDISGINASVVNIQKEIDRLNEVAKNLNESLIDLQELGKYEQGSGYIPEAPRDGQAYVRKDGEWVLLSTFLGRSLEVLFQGPGSLPETGGGSDYKDDDDKGGGGSGGGGSGGGGSGGGGSGGGGSHHHHHH

SEQ ID NO: 113 - protein, 1297 aa, Artificial Sequence
  source: /note="Description of Artificial Sequence: Synthetic polypeptide"
MFVFLVLLPLVSSQCVNLTTRTQLPPAYTNSFTRGVYYPDKVFRSSVLHSTQDLFLPFFSNVTWFHAIHVSGTNGTKRFDNPVLPFNDGVYFASTEKSNIIRGWIFGTTLDSKTQSLLIVNNATNVVIKVCEFQFCNDPFLGVYYHKNNKSWMESEFRVYSSANNCTFEYVSQPFLMDLEGKQGNFKNLREFVFKNIDGYFKIYSKHTPINLVRDLPQGFSALEPLVDLPIGINITRFQTLLALHRSYLTPGDSSSGWTAGAAAYYVGYLQPRTFLLKYNENGTITDAVDCALDPLSETKCTLKSFTVEKGIYQTSNFRVQPTESIVRFPNITNLCPFGEVFNATRFASVYAWNRKRISNCVADYSVLYNSASFSTFKCYGVSPTKLNDLCFTNVYADSFVIRGDEVRQIAPGQTGKIADYNYKLPDDFTGCVIAWNSNNLDSKVGGNYNYLYRLFRKSNLKPFERDISTEIYQAGSTPCNGVEGFNCYFPLQSYGFQPTNGVGYQPYRVVVLSFELLHAPATVCGPKKSTNLVKNKCVNFNFNGLTGTGVLTESNKKFLPFQQFGRDIADTTDAVRDPQTLEILDITPCSFGGVSVITPGTNTSNQVAVLYQNVNCTEVPVAIHADQLTPTWRVYSTGSNVFQTRAGCLIGAEHVNNSYECDIPIGAGICASYQTQTNSPSRAGSVASQSIIAYTMSLGAENSVAYSNNSIAIPTNFTISVTTEILPVSMTKTSVDCTMYICGDSTECSNLLLQYGSFCTQLNRALTGIAVEQDKNTQEVFAQVKQIYKTPPIKDFGGFNFSQILPDPSKPSKRSFIEDLLFNKVTLADAGFIKQYGDCLGDIAARDLICAQKFNGLTVLPPLLTDEMIAQYTSALLAGTITSGWTFGAGPALQIPFAMQMAYRFNGIGVTQNVLYENQKLIANQFNSAIGKIQDSLSSTASALGKLQDVVNQNAQALNTLVKQLSSNFGAISSVLNDILSRLDPPEAEVQIDRLITGRLQSLQTYVTQQLIRAAEIRASANLAATKMSECVLGQSKRVDFCGKGYHLMSFPQSAPHGVVFLHVTYVPAQEKNFTTAPAICHDGKAHFPREGVFVSNGTHWFVTQRNFYEPQIITTDNTFVSGNCDVVIGIVNNTVYDPLQPELDSFKEELDKYFKNHTSPDVDLGDISGINASVVNIQKEIDRLNEVAKNLNESLIDLQELGKYEQGSGYIPEAPRDGQAYVRKDGEWVLLSTFLGRSLEVLFQGPGSLPETGGGSDYKDDDDKGGGGSGGGGSGGGGSGGGGSGGGGSHHHHHH

SEQ ID NO: 114 - protein, 1297 aa, Artificial Sequence
  source: /note="Description of Artificial Sequence: Synthetic polypeptide"
MFVFLVLLPLVSSQCVNLTTRTQLPPAYTNSFTRGVYYPDKVFRSSVLHSTQDLFLPFFSNVTWFHAIHVSGTNGTKRFDNPVLPFNDGVYFASTEKSNIIRGWIFGTTLDSKTQSLLIVNNATNVVIKVCEFQFCNDPFLGVYYHKNNKSWMESEFRVYSSANNCTFEYVSQPFLMDLEGKQGNFKNLREFVFKNIDGYFKIYSKHTPINLVRDLPQGFSALEPLVDLPIGINITRFQTLLALHRSYLTPGDSSSGWTAGAAAYYVGYLQPRTFLLKYNENGTITDAVDCALDPLSETKCTLKSFTVEKGIYQTSNFRVQPTESIVRFPNITNLCPFGEVFNATRFASVYAWNRKRISNCVADYSVLYNSASFSTFKCYGVSPTKLNDLCFTNVYADSFVIRGDEVRQIAPGQTGKIADYNYKLPDDFTGCVIAWNSNNLDSKVGGNYNYLYRLFRKSNLKPFERDISTEIYQAGSTPCNGVEGFNCYFPLQSYGFQPTNGVGYQPYRVVVLSFELLHAPATVCGPKKSTNLVKNKCVNFNFNGLTGTGVLTESNKKFLPFQQFGRDIADITDAVRDPQTLEILDITPCSFGGVSVITPGTNTSNQVAVLYQDVNCTEVPVAIHADQLTPTWRVYSTGSNVFQTRAGCLIGAEHVNNSYECDIPIGAGICASYQTQTNSPSRAGSVASQSIIAYTMSLGAENSVAYSNNSIAIPTNFTISVTTEILPVSMTKTSVDCTMYICGDSTECSNLLLQYGSFCTQLNRALTGIAVEQDKNTQEVFAQVKQIYKTPPIKDFGGFNFSQILPDPSKPSKRSFIEDLLFNKVTLADAGFIKQYGDCLGDIAARDLICAQKFNGLTVLPPLLTDEMIAQYTSALLAGTITSGWTFGAGPALQIPFAMQMAYRFNGIGVTQNVLYENQKLIANQFNSAIGKIQDSLSSTASALGKLQDVVNQNAQALNTLVKQLSSNFGAISSVLNDILSRLDPPEAEVQIDRLITGRLQSLQTYVTQQLIRAAEIRASANLAATKMSECVLGQSKRVDFCGKGYHLMSFPQSAPHGVVFLHVTYVPAQEKNFTTAPAICHDGKAHFPREGVFVSNGTHWFVTQRNFYEPQIITTDNTFVSGNCDVVIGIVNNTVYDPLQPELDSFKEELDKYFKNHTSPDVDLGDISGINASVVNIQKEIDRLNEVAKNLNESLIDLQELGKYEQGSGYIPEAPRDGQAYVRKDGEWVLLSTFLGRSLEVLFQGPGSLPETGGGSDYKDDDDKGGGGSGGGGSGGGGSGGGGSGGGGSHHHHHH

SEQ ID NO: 115 - protein, 1297 aa, Artificial Sequence
  source: /note="Description of Artificial Sequence: Synthetic polypeptide"
MFVFLVLLPLVSSQCVNLTTRTQLPPAYTNSFTRGVYYPDKVFRSSVLHSTQDLFLPFFSNVTWFHAIHVSGTNGTKRFDNPVLPFNDGVYFASTEKSNIIRGWIFGTTLDSKTQSLLIVNNATNVVIKVCEFQFCNDPFLGVYYHKNNKSWMESEFRVYSSANNCTFEYVSQPFLMDLEGKQGNFKNLREFVFKNIDGYFKIYSKHTPINLVRDLPQGFSALEPLVDLPIGINITRFQTLLALHRSYLTPGDSSSGWTAGAAAYYVGYLQPRTFLLKYNENGTITDAVDCALDPLSETKCTLKSFTVEKGIYQTSNFRVQPTESIVRFPNITNLCPFGEVFNATRFASVYAWNRKRISNCVADYSVLYNSASFSTFKCYGVSPTKLNDLCFTNVYADSFVIRGDEVRQIAPGQTGKIADYNYKLPDDFTGCVIAWNSNNLDSKVGGNYNYLYRLFRKSNLKPFERDISTEIYQAGSTPCNGVEGFNCYFPLQSYGFQPTNGVGYQPYRVVVLSFELLHAPATVCGPKKSTPLVKNKCVNFNFNGLTGTGVLTESNKKFLPFQQFGRDIADTTDAVRDPQTLEILDITPCSFGGVSVITPGTNTSNQVAVLYQDVNCTEVPVAIHADQLTPTWRVYSTGSNVFQTRAGCLIGAEHVNNSYECDIPIGAGICASYQTQTNSPSRAGSVASQSIIAYTMSLGAENSVAYSNNSIAIPTNFTISVTTEILPVSMTKTSVDCTMYICGDSTECSNLLLQYGSFCTQLNRALTGIAVEQDKNTQEVFAQVKQIYKTPPIKDFGGFNFSQILPDPSKPSKRSFIEDLLFNKVTLADAGFIKQYGDCLGDIAARDLICAQKFNGLTVLPPLLTDEMIAQYTSALLAGTITSGWTFGAGPALQIPFAMQMAYRFNGIGVTQNVLYENQKLIANQFNSAIGKIQDSLSSTASALGKLQDVVNQNAQALNTLVKQLSSNFGAISSVLNDILSRLDPPEAEVQIDRLITGRLQSLQTYVTQQLIRAAEIRASANLAATKMSECVLGQSKRVDFCGKGYHLMSFPQSAPHGVVFLHVTYVPAQEKNFTTAPAICHDGKAHFPREGVFVSNGTHWFVTQRNFYEPQIITTDNTFVSGNCDVVIGIVNNTVYDPLQPELDSFKEELDKYFKNHTSPDVDLGDISGINASVVNIQKEIDRLNEVAKNLNESLIDLQELGKYEQGSGYIPEAPRDGQAYVRKDGEWVLLSTFLGRSLEVLFQGPGSLPETGGGSDYKDDDDKGGGGSGGGGSGGGGSGGGGSGGGGSHHHHHH

SEQ ID NO: 116 - protein, 1297 aa, Artificial Sequence
  source: /note="Description of Artificial Sequence: Synthetic polypeptide"
MFVFLVLLPLVSSQCVNLTTRTQLPPAYTNSFTRGVYYPDKVFRSSVLHSTQDLFLPFFSNVTWFHAIHVSGTNGTKRFDNPVLPFNDGVYFASTEKSNIIRGWIFGTTLDSKTQSLLIVNNATNVVIKVCEFQFCNDPFLGVYYHKNNKSWMESEFRVYSSANNCTFEYVSQPFLMDLEGKQGNFKNLREFVFKNIDGYFKIYSKHTPINLVRDLPQGFSALEPLVDLPIGINITRFQTLLALHRSYLTPGDSSSGWTAGAAAYYVGYLQPRTFLLKYNENGTITDAVDCALDPLSETKCTLKSFTVEKGIYQTSNFRVQPTESIVRFPNITNLCPFGEVFNATRFASVYAWNRKRISNCVADYSVLYNSASFSTFKCYGVSPTKLNDLCFTNVYADSFVIRGDEVRQIAPGQTGKIADYNYKLPDDFTGCVIAWNSNNLDSKVGGNYNYLYRLFRKSNLKPFERDISTEIYQAGSTPCNGVEGFNCYFPLQSYGFQPTNGVGYQPYRVVVLSFELLHAPATVCGPKKSTNLVKNKCVNFNFNGLTGTGVLTESNKKFLPFQQFGRDIADTTDAVRDPQTLEILDITPCSFGGVSVITPGTNTSNQVAVLYQDVNCTEVPVAIHADQLTPTWRVYSTGSNVFQTRAGCLIGAEHVNNSYECDIPIGAGICASYQTQTNSPSRAGSVASQSIIAYTMSLGAENSVAYSNNSIAIPTNFTISVTTEILPVSMTKTSVDCTMYICGDSTECSNLLLQYGSFCTQLNRALTGIAVEQDKNTQEVFAQVKQIYKTPPIKDFGGFNFSQILPDPSKPSKRSFIEDLLFNKVTLADAGFIKQYGDCLGDIAARDLICAQKFNGLTVLPPLLTDEMIAQYTSALLACTITSGWTCGAGPALQIPFAMQMAYRFNGIGVTQNVLYENQKLIANQFNSAIGKIQDSLSSTASALGKLQDVVNQNAQALNTLVKQLSSNFGAISSVLNDILSRLDPPEAEVQIDRLITGRLQSLQTYVTQQLIRAAEIRASANLAATKMSECVLGQSKRVDFCGKGYHLMSFPQSAPHGVVFLHVTYVPAQEKNFTTAPAICHDGKAHFPREGVFVSNGTHWFVTQRNFYEPQIITTDNTFVSGNCDVVIGIVNNTVYDPLQPELDSFKEELDKYFKNHTSPDVDLGDISGINASVVNIQKEIDRLNEVAKNLNESLIDLQELGKYEQGSGYIPEAPRDGQAYVRKDGEWVLLSTFLGRSLEVLFQGPGSLPETGGGSDYKDDDDKGGGGSGGGGSGGGGSGGGGSGGGGSHHHHHH

SEQ ID NO: 117 - protein, 1297 aa, Artificial Sequence
  source: /note="Description of Artificial Sequence: Synthetic polypeptide"
MFVFLVLLPLVSSQCVNLTTRTQLPPAYTNSFTRGVYYPDKVFRSSVLHSTQDLFLPFFSNVTWFHAIHVSGTNGTKRFDNPVLPFNDGVYFASTEKSNIIRGWIFGTTLDSKTQSLLIVNNATNVVIKVCEFQFCNDPFLGVYYHKNNKSWMESEFRVYSSANNCTFEYVSQPFLMDLEGKQGNFKNLREFVFKNIDGYFKIYSKHTPINLVRDLPQGFSALEPLVDLPIGINITRFQTLLALHRSYLTPGDSSSGWTAGAAAYYVGYLQPRTFLLKYNENGTITDAVDCALDPLSETKCTLKSFTVEKGIYQTSNFRVQPTESIVRFPNITNLCPFGEVFNATRFASVYAWNRKRISNCVADYSVLYNSASFSTFKCYGVSPTKLNDLCFTNVYADSFVIRGDEVRQIAPGQTGKIADYNYKLPDDFTGCVIAWNSNNLDSKVGGNYNYLYRLFRKSNLKPFERDISTEIYQAGSTPCNGVEGFNCYFPLQSYGFQPTNGVGYQPYRVVVLSFELLHAPATVCGPKKSTNLVKNKCVNFNFNGLTGTGVLTESNKKFLPFQQFGRDIADTTDAVRDPQTLEILDITPCSFGGVSVITPGTNTSNQVAVLYQDVNCTEVPVAIHADQLTPTWRVYSTGSNVFQTRAGCLIGAEHVNNSYECDIPIGAGICASYQTQTNSPSRAGSVASQSIIAYTMSLGAENSVAYSNNSIAIPTNFTISVTTEILPVSMTKTSVDCTMYICGDSTECSNLLLQYGSFCTQLNRALTGIAVEQDKNTQEVFAQVKQIYKTPPIKDFGGFNFSQILPDPSKPSKRSFIEDLLFNKVTLADAGFIKQYGDCLGDIAARDLICAQKFNGLTVLPPLLTDEMIAQYTSALLAGTITCGWTFGAGPCLQIPFAMQMAYRFNGIGVTQNVLYENQKLIANQFNSAIGKIQDSLSSTASALGKLQDVVNQNAQALNTLVKQLSSNFGAISSVLNDILSRLDPPEAEVQIDRLITGRLQSLQTYVTQQLIRAAEIRASANLAATKMSECVLGQSKRVDFCGKGYHLMSFPQSAPHGVVFLHVTYVPAQEKNFTTAPAICHDGKAHFPREGVFVSNGTHWFVTQRNFYEPQIITTDNTFVSGNCDVVIGIVNNTVYDPLQPELDSFKEELDKYFKNHTSPDVDLGDISGINASVVNIQKEIDRLNEVAKNLNESLIDLQELGKYEQGSGYIPEAPRDGQAYVRKDGEWVLLSTFLGRSLEVLFQGPGSLPETGGGSDYKDDDDKGGGGSGGGGSGGGGSGGGGSGGGGSHHHHHH

SEQ ID NO: 118 - protein, 1297 aa, Artificial Sequence
  source: /note="Description of Artificial Sequence: Synthetic polypeptide"
MFVFLVLLPLVSSQCVNLTTRTQLPPAYTNSFTRGVYYPDKVFRSSVLHSTQDLFLPFFSNVTWFHAIHVSGTNGTKRFDNPVLPFNDGVYFASTEKSNIIRGWIFGTTLDSKTQSLLIVNNATNVVIKVCEFQFCNDPFLGVYYHKNNKSWMESEFRVYSSANNCTFEYVSQPFLMDLEGKQGNFKNLREFVFKNIDGYFKIYSKHTPINLVRDLPQGFSALEPLVDLPIGINITRFQTLLALHRSYLTPGDSSSGWTAGAAAYYVGYLQPRTFLLKYNENGTITDAVDCALDPLSETKCTLKSFTVEKGIYQTSNFRVQPTESIVRFPNITNLCPFGEVFNATRFASVYAWNRKRISNCVADYSVLYNSASFSTFKCYGVSPTKLNDLCFTNVYADSFVIRGDEVRQIAPGQTGKIADYNYKLPDDFTGCVIAWNSNNLDSKVGGNYNYLYRLFRKSNLKPFERDISTEIYQAGSTPCNGVEGFNCYFPLQSYGFQPTNGVGYQPYRVVVLSFELLHAPATVCGPKKSTNLVKNKCVNFNFNGLTGTGVLTESNKKFLPFQQFGRDIADITDAVRDPQTLEILDITPCSFGGVSVITPGTNTSNQVAVLYQNVNCTEVPVAIHADQLTPTWRVYSTGSNVFQTRAGCLIGAEHVNNSYECDIPIGAGICASYQTQTNSPSRAGSVASQSIIAYTMSLGAENSVAYSNNSIAIPTNFTISVTTEILPVSMTKTSVDCTMYICGDSTECSNLLLQYGSFCTQLNRALTGIAVEQDKNTQEVFAQVKQIYKTPPIKDFGGFNFSQILPDPSKPSKRSFIEDLLFNKVTLADAGFIKQYGDCLGDIAARDLICAQKFNGLTVLPPLLTDEMIAQYTSALLAGTITSGWTFGAGAALQIPFAMQMAYRFNGIGVTQNVLYENQKLIANQFNSAIGKIQDSLSSTASALGKLQDVVNQNAQALNTLVKQLSSNFGAISSVLNDILSRLDPPEAEVQIDRLITGRLQSLQTYVTQQLIRAAEIRASANLAATKMSECVLGQSKRVDFCGKGYHLMSFPQSAPHGVVFLHVTYVPAQEKNFTTAPAICHDGKAHFPREGVFVSNGTHWFVTQRNFYEPQIITTDNTFVSGNCDVVIGIVNNTVYDPLQPELDSFKEELDKYFKNHTSPDVDLGDISGINASVVNIQKEIDRLNEVAKNLNESLIDLQELGKYEQGSGYIPEAPRDGQAYVRKDGEWVLLSTFLGRSLEVLFQGPGSLPETGGGSDYKDDDDKGGGGSGGGGSGGGGSGGGGSGGGGSHHHHHH

SEQ ID NO: 119 - protein, 1297 aa, Artificial Sequence
  source: /note="Description of Artificial Sequence: Synthetic polypeptide"
MFVFLVLLPLVSSQCVNLTTRTQLPPAYTNSFTRGVYYPDKVFRSSVLHSTQDLFLPFFSNVTWFHAIHVSGTNGTKRFDNPVLPFNDGVYFASTEKSNIIRGWIFGTTLDSKTQSLLIVNNATNVVIKVCEFQFCNDPFLGVYYHKNNKSWMESEFRVYSSANNCTFEYVSQPFLMDLEGKQGNFKNLREFVFKNIDGYFKIYSKHTPINLVRDLPQGFSALEPLVDLPIGINITRFQTLLALHRSYLTPGDSSSGWTAGAAAYYVGYLQPRTFLLKYNENGTITDAVDCALDPLSETKCTLKSFTVEKGIYQTSNFRVQPTESIVRFPNITNLCPFGEVFNATRFASVYAWNRKRISNCVADYSVLYNSASFSTFKCYGVSPTKLNDLCFTNVYADSFVIRGDEVRQIAPGQTGKIADYNYKLPDDFTGCVIAWNSNNLDSKVGGNYNYLYRLFRKSNLKPFERDISTEIYQAGSTPCNGVEGFNCYFPLQSYGFQPTNGVGYQPYRVVVLSFELLHAPATVCGPKKSTPLVKNKCVNFNFNGLTGTGVLTESNKKFLPFQQFGRDIADTTDAVRDPQTLEILDITPCSFGGVSVITPGTNTSNQVAVLYQNVNCTEVPVAIHADQLTPTWRVYSTGSNVFQTRAGCLIGAEHVNNSYECDIPIGAGICASYQTQTNSPSRAGSVASQSIIAYTMSLGAENSVAYSNNSIAIPTNFTISVTTEILPVSMTKTSVDCTMYICGDSTECSNLLLQYGSFCTQLNRALTGIAVEQDKNTQEVFAQVKQIYKTPPIKDFGGFNFSQILPDPSKPSKRSFIEDLLFNKVTLADAGFIKQYGDCLGDIAARDLICAQKFNGLTVLPPLLTDEMIAQYTSALLAGTITSGWTFGAGAALQIPFAMQMAYRFNGIGVTQNVLYENQKLIANQFNSAIGKIQDSLSSTASALGKLQDVVNQNAQALNTLVKQLSSNFGAISSVLNDILSRLDPPEAEVQIDRLITGRLQSLQTYVTQQLIRAAEIRASANLAATKMSECVLGQSKRVDFCGKGYHLMSFPQSAPHGVVFLHVTYVPAQEKNFTTAPAICHDGKAHFPREGVFVSNGTHWFVTQRNFYEPQIITTDNTFVSGNCDVVIGIVNNTVYDPLQPELDSFKEELDKYFKNHTSPDVDLGDISGINASVVNIQKEIDRLNEVAKNLNESLIDLQELGKYEQGSGYIPEAPRDGQAYVRKDGEWVLLSTFLGRSLEVLFQGPGSLPETGGGSDYKDDDDKGGGGSGGGGSGGGGSGGGGSGGGGSHHHHHH

SEQ ID NO: 120 - protein, 1297 aa, Artificial Sequence
  source: /note="Description of Artificial Sequence: Synthetic polypeptide"
MFVFLVLLPLVSSQCVNLTTRTQLPPAYTNSFTRGVYYPDKVFRSSVLHSTQDLFLPFFSNVTWFHAIHVSGTNGTKRFDNPVLPFNDGVYFASTEKSNIIRGWIFGTTLDSKTQSLLIVNNATNVVIKVCEFQFCNDPFLGVYYHKNNKSWMESEFRVYSSANNCTFEYVSQPFLMDLEGKQGNFKNLREFVFKNIDGYFKIYSKHTPINLVRDLPQGFSALEPLVDLPIGINITRFQTLLALHRSYLTPGDSSSGWTAGAAAYYVGYLQPRTFLLKYNENGTITDAVDCALDPLSETKCTLKSFTVEKGIYQTSNFRVQPTESIVRFPNITNLCPFGEVFNATRFASVYAWNRKRISNCVADYSVLYNSASFSTFKCYGVSPTKLNDLCFTNVYADSFVIRGDEVRQIAPGQTGKIADYNYKLPDDFTGCVIAWNSNNLDSKVGGNYNYLYRLFRKSNLKPFERDISTEIYQAGSTPCNGVEGFNCYFPLQSYGFQPTNGVGYQPYRVVVLSFELLHAPATVCGPKKSTNLVKNKCVNFNFNGLTGTGVLTESNKKFLPFQQFGRDIADTTDAVRDPQTLEILDITPCSFGGVSVITPGTNTSNQVAVLYQNVNCTEVPVAIHADQLTPTWRVYSTGSNVFQTRAGCLIGAEHVNNSYECDIPIGAGICASYQTQTNSPSRAGSVASQSIIAYTMSLGAENSVAYSNNSIAIPTNFTISVTTEILPVSMTKTSVDCTMYICGDSTECSNLLLQYGSFCTQLNRALTGIAVEQDKNTQEVFAQVKQIYKTPPIKDFGGFNFSQILPDPSKPSKRSFIEDLLFNKVTLADAGFIKQYGDCLGDIAARDLICAQKFNGLTVLPPLLTDEMIAQYTSALLACTITSGWTCGAGAALQIPFAMQMAYRFNGIGVTQNVLYENQKLIANQFNSAIGKIQDSLSSTASALGKLQDVVNQNAQALNTLVKQLSSNFGAISSVLNDILSRLDPPEAEVQIDRLITGRLQSLQTYVTQQLIRAAEIRASANLAATKMSECVLGQSKRVDFCGKGYHLMSFPQSAPHGVVFLHVTYVPAQEKNFTTAPAICHDGKAHFPREGVFVSNGTHWFVTQRNFYEPQIITTDNTFVSGNCDVVIGIVNNTVYDPLQPELDSFKEELDKYFKNHTSPDVDLGDISGINASVVNIQKEIDRLNEVAKNLNESLIDLQELGKYEQGSGYIPEAPRDGQAYVRKDGEWVLLSTFLGRSLEVLFQGPGSLPETGGGSDYKDDDDKGGGGSGGGGSGGGGSGGGGSGGGGSHHHHHH

SEQ ID NO: 121 - protein, 1297 aa, Artificial Sequence
  source: /note="Description of Artificial Sequence: Synthetic polypeptide"
MFVFLVLLPLVSSQCVNLTTRTQLPPAYTNSFTRGVYYPDKVFRSSVLHSTQDLFLPFFSNVTWFHAIHVSGTNGTKRFDNPVLPFNDGVYFASTEKSNIIRGWIFGTTLDSKTQSLLIVNNATNVVIKVCEFQFCNDPFLGVYYHKNNKSWMESEFRVYSSANNCTFEYVSQPFLMDLEGKQGNFKNLREFVFKNIDGYFKIYSKHTPINLVRDLPQGFSALEPLVDLPIGINITRFQTLLALHRSYLTPGDSSSGWTAGAAAYYVGYLQPRTFLLKYNENGTITDAVDCALDPLSETKCTLKSFTVEKGIYQTSNFRVQPTESIVRFPNITNLCPFGEVFNATRFASVYAWNRKRISNCVADYSVLYNSASFSTFKCYGVSPTKLNDLCFTNVYADSFVIRGDEVRQIAPGQTGKIADYNYKLPDDFTGCVIAWNSNNLDSKVGGNYNYLYRLFRKSNLKPFERDISTEIYQAGSTPCNGVEGFNCYFPLQSYGFQPTNGVGYQPYRVVVLSFELLHAPATVCGPKKSTNLVKNKCVNFNFNGLTGTGVLTESNKKFLPFQQFGRDIADTTDAVRDPQTLEILDITPCSFGGVSVITPGTNTSNQVAVLYQNVNCTEVPVAIHADQLTPTWRVYSTGSNVFQTRAGCLIGAEHVNNSYECDIPIGAGICASYQTQTNSPSRAGSVASQSIIAYTMSLGAENSVAYSNNSIAIPTNFTISVTTEILPVSMTKTSVDCTMYICGDSTECSNLLLQYGSFCTQLNRALTGIAVEQDKNTQEVFAQVKQIYKTPPIKDFGGFNFSQILPDPSKPSKRSFIEDLLFNKVTLADAGFIKQYGDCLGDIAARDLICAQKFNGLTVLPPLLTDEMIAQYTSALLAGTITCGWTFGAGACLQIPFAMQMAYRFNGIGVTQNVLYENQKLIANQFNSAIGKIQDSLSSTASALGKLQDVVNQNAQALNTLVKQLSSNFGAISSVLNDILSRLDPPEAEVQIDRLITGRLQSLQTYVTQQLIRAAEIRASANLAATKMSECVLGQSKRVDFCGKGYHLMSFPQSAPHGVVFLHVTYVPAQEKNFTTAPAICHDGKAHFPREGVFVSNGTHWFVTQRNFYEPQIITTDNTFVSGNCDVVIGIVNNTVYDPLQPELDSFKEELDKYFKNHTSPDVDLGDISGINASVVNIQKEIDRLNEVAKNLNESLIDLQELGKYEQGSGYIPEAPRDGQAYVRKDGEWVLLSTFLGRSLEVLFQGPGSLPETGGGSDYKDDDDKGGGGSGGGGSGGGGSGGGGSGGGGSHHHHHH

SEQ ID NO: 122 - protein, 1297 aa, Artificial Sequence
  source: /note="Description of Artificial Sequence: Synthetic polypeptide"
MFVFLVLLPLVSSQCVNLTTRTQLPPAYTNSFTRGVYYPDKVFRSSVLHSTQDLFLPFFSNVTWFHAIHVSGTNGTKRFDNPVLPFNDGVYFASTEKSNIIRGWIFGTTLDSKTQSLLIVNNATNVVIKVCEFQFCNDPFLGVYYHKNNKSWMESEFRVYSSANNCTFEYVSQPFLMDLEGKQGNFKNLREFVFKNIDGYFKIYSKHTPINLVRDLPQGFSALEPLVDLPIGINITRFQTLLALHRSYLTPGDSSSGWTAGAAAYYVGYLQPRTFLLKYNENGTITDAVDCALDPLSETKCTLKSFTVEKGIYQTSNFRVQPTESIVRFPNITNLCPFGEVFNATRFASVYAWNRKRISNCVADYSVLYNSASFSTFKCYGVSPTKLNDLCFTNVYADSFVIRGDEVRQIAPGQTGKIADYNYKLPDDFTGCVIAWNSNNLDSKVGGNYNYLYRLFRKSNLKPFERDISTEIYQAGSTPCNGVEGFNCYFPLQSYGFQPTNGVGYQPYRVVVLSFELLHAPATVCGPKKSTPLVKNKCVNFNFNGLTGTGVLTESNKKFLPFQQFGRDIADITDAVRDPQTLEILDITPCSFGGVSVITPGTNTSNQVAVLYQDVNCTEVPVAIHADQLTPTWRVYSTGSNVFQTRAGCLIGAEHVNNSYECDIPIGAGICASYQTQTNSPSRAGSVASQSIIAYTMSLGAENSVAYSNNSIAIPTNFTISVTTEILPVSMTKTSVDCTMYICGDSTECSNLLLQYGSFCTQLNRALTGIAVEQDKNTQEVFAQVKQIYKTPPIKDFGGFNFSQILPDPSKPSKRSFIEDLLFNKVTLADAGFIKQYGDCLGDIAARDLICAQKFNGLTVLPPLLTDEMIAQYTSALLAGTITSGWTFGAGAALQIPFAMQMAYRFNGIGVTQNVLYENQKLIANQFNSAIGKIQDSLSSTASALGKLQDVVNQNAQALNTLVKQLSSNFGAISSVLNDILSRLDPPEAEVQIDRLITGRLQSLQTYVTQQLIRAAEIRASANLAATKMSECVLGQSKRVDFCGKGYHLMSFPQSAPHGVVFLHVTYVPAQEKNFTTAPAICHDGKAHFPREGVFVSNGTHWFVTQRNFYEPQIITTDNTFVSGNCDVVIGIVNNTVYDPLQPELDSFKEELDKYFKNHTSPDVDLGDISGINASVVNIQKEIDRLNEVAKNLNESLIDLQELGKYEQGSGYIPEAPRDGQAYVRKDGEWVLLSTFLGRSLEVLFQGPGSLPETGGGSDYKDDDDKGGGGSGGGGSGGGGSGGGGSGGGGSHHHHHH

SEQ ID NO: 123 - protein, 1297 aa, Artificial Sequence
  source: /note="Description of Artificial Sequence: Synthetic polypeptide"
MFVFLVLLPLVSSQCVNLTTRTQLPPAYTNSFTRGVYYPDKVFRSSVLHSTQDLFLPFFSNVTWFHAIHVSGTNGTKRFDNPVLPFNDGVYFASTEKSNIIRGWIFGTTLDSKTQSLLIVNNATNVVIKVCEFQFCNDPFLGVYYHKNNKSWMESEFRVYSSANNCTFEYVSQPFLMDLEGKQGNFKNLREFVFKNIDGYFKIYSKHTPINLVRDLPQGFSALEPLVDLPIGINITRFQTLLALHRSYLTPGDSSSGWTAGAAAYYVGYLQPRTFLLKYNENGTITDAVDCALDPLSETKCTLKSFTVEKGIYQTSNFRVQPTESIVRFPNITNLCPFGEVFNATRFASVYAWNRKRISNCVADYSVLYNSASFSTFKCYGVSPTKLNDLCFTNVYADSFVIRGDEVRQIAPGQTGKIADYNYKLPDDFTGCVIAWNSNNLDSKVGGNYNYLYRLFRKSNLKPFERDISTEIYQAGSTPCNGVEGFNCYFPLQSYGFQPTNGVGYQPYRVVVLSFELLHAPATVCGPKKSTNLVKNKCVNFNFNGLTGTGVLTESNKKFLPFQQFGRDIADITDAVRDPQTLEILDITPCSFGGVSVITPGTNTSNQVAVLYQDVNCTEVPVAIHADQLTPTWRVYSTGSNVFQTRAGCLIGAEHVNNSYECDIPIGAGICASYQTQTNSPSRAGSVASQSIIAYTMSLGAENSVAYSNNSIAIPTNFTISVTTEILPVSMTKTSVDCTMYICGDSTECSNLLLQYGSFCTQLNRALTGIAVEQDKNTQEVFAQVKQIYKTPPIKDFGGFNFSQILPDPSKPSKRSFIEDLLFNKVTLADAGFIKQYGDCLGDIAARDLICAQKFNGLTVLPPLLTDEMIAQYTSALLACTITSGWTCGAGAALQIPFAMQMAYRFNGIGVTQNVLYENQKLIANQFNSAIGKIQDSLSSTASALGKLQDVVNQNAQALNTLVKQLSSNFGAISSVLNDILSRLDPPEAEVQIDRLITGRLQSLQTYVTQQLIRAAEIRASANLAATKMSECVLGQSKRVDFCGKGYHLMSFPQSAPHGVVFLHVTYVPAQEKNFTTAPAICHDGKAHFPREGVFVSNGTHWFVTQRNFYEPQIITTDNTFVSGNCDVVIGIVNNTVYDPLQPELDSFKEELDKYFKNHTSPDVDLGDISGINASVVNIQKEIDRLNEVAKNLNESLIDLQELGKYEQGSGYIPEAPRDGQAYVRKDGEWVLLSTFLGRSLEVLFQGPGSLPETGGGSDYKDDDDKGGGGSGGGGSGGGGSGGGGSGGGGSHHHHHH

SEQ ID NO: 124 - protein, 1297 aa, Artificial Sequence
  source: /note="Description of Artificial Sequence: Synthetic polypeptide"
MFVFLVLLPLVSSQCVNLTTRTQLPPAYTNSFTRGVYYPDKVFRSSVLHSTQDLFLPFFSNVTWFHAIHVSGTNGTKRFDNPVLPFNDGVYFASTEKSNIIRGWIFGTTLDSKTQSLLIVNNATNVVIKVCEFQFCNDPFLGVYYHKNNKSWMESEFRVYSSANNCTFEYVSQPFLMDLEGKQGNFKNLREFVFKNIDGYFKIYSKHTPINLVRDLPQGFSALEPLVDLPIGINITRFQTLLALHRSYLTPGDSSSGWTAGAAAYYVGYLQPRTFLLKYNENGTITDAVDCALDPLSETKCTLKSFTVEKGIYQTSNFRVQPTESIVRFPNITNLCPFGEVFNATRFASVYAWNRKRISNCVADYSVLYNSASFSTFKCYGVSPTKLNDLCFTNVYADSFVIRGDEVRQIAPGQTGKIADYNYKLPDDFTGCVIAWNSNNLDSKVGGNYNYLYRLFRKSNLKPFERDISTEIYQAGSTPCNGVEGFNCYFPLQSYGFQPTNGVGYQPYRVVVLSFELLHAPATVCGPKKSTNLVKNKCVNFNFNGLTGTGVLTESNKKFLPFQQFGRDIADITDAVRDPQTLEILDITPCSFGGVSVITPGTNTSNQVAVLYQDVNCTEVPVAIHADQLTPTWRVYSTGSNVFQTRAGCLIGAEHVNNSYECDIPIGAGICASYQTQTNSPSRAGSVASQSIIAYTMSLGAENSVAYSNNSIAIPTNFTISVTTEILPVSMTKTSVDCTMYICGDSTECSNLLLQYGSFCTQLNRALTGIAVEQDKNTQEVFAQVKQIYKTPPIKDFGGFNFSQILPDPSKPSKRSFIEDLLFNKVTLADAGFIKQYGDCLGDIAARDLICAQKFNGLTVLPPLLTDEMIAQYTSALLAGTITCGWTFGAGACLQIPFAMQMAYRFNGIGVTQNVLYENQKLIANQFNSAIGKIQDSLSSTASALGKLQDVVNQNAQALNTLVKQLSSNFGAISSVLNDILSRLDPPEAEVQIDRLITGRLQSLQTYVTQQLIRAAEIRASANLAATKMSECVLGQSKRVDFCGKGYHLMSFPQSAPHGVVFLHVTYVPAQEKNFTTAPAICHDGKAHFPREGVFVSNGTHWFVTQRNFYEPQIITTDNTFVSGNCDVVIGIVNNTVYDPLQPELDSFKEELDKYFKNHTSPDVDLGDISGINASVVNIQKEIDRLNEVAKNLNESLIDLQELGKYEQGSGYIPEAPRDGQAYVRKDGEWVLLSTFLGRSLEVLFQGPGSLPETGGGSDYKDDDDKGGGGSGGGGSGGGGSGGGGSGGGGSHHHHHH

SEQ ID NO: 125 - protein, 1297 aa, Artificial Sequence
  source: /note="Description of Artificial Sequence: Synthetic polypeptide"
MFVFLVLLPLVSSQCVNLTTRTQLPPAYTNSFTRGVYYPDKVFRSSVLHSTQDLFLPFFSNVTWFHAIHVSGTNGTKRFDNPVLPFNDGVYFASTEKSNIIRGWIFGTTLDSKTQSLLIVNNATNVVIKVCEFQFCNDPFLGVYYHKNNKSWMESEFRVYSSANNCTFEYVSQPFLMDLEGKQGNFKNLREFVFKNIDGYFKIYSKHTPINLVRDLPQGFSALEPLVDLPIGINITRFQTLLALHRSYLTPGDSSSGWTAGAAAYYVGYLQPRTFLLKYNENGTITDAVDCALDPLSETKCTLKSFTVEKGIYQTSNFRVQPTESIVRFPNITNLCPFGEVFNATRFASVYAWNRKRISNCVADYSVLYNSASFSTFKCYGVSPTKLNDLCFTNVYADSFVIRGDEVRQIAPGQTGKIADYNYKLPDDFTGCVIAWNSNNLDSKVGGNYNYLYRLFRKSNLKPFERDISTEIYQAGSTPCNGVEGFNCYFPLQSYGFQPTNGVGYQPYRVVVLSFELLHAPATVCGPKKSTPLVKNKCVNFNFNGLTGTGVLTESNKKFLPFQQFGRDIADTTDAVRDPQTLEILDITPCSFGGVSVITPGTNTSNQVAVLYQDVNCTEVPVAIHADQLTPTWRVYSTGSNVFQTRAGCLIGAEHVNNSYECDIPIGAGICASYQTQTNSPSRAGSVASQSIIAYTMSLGAENSVAYSNNSIAIPTNFTISVTTEILPVSMTKTSVDCTMYICGDSTECSNLLLQYGSFCTQLNRALTGIAVEQDKNTQEVFAQVKQIYKTPPIKDFGGFNFSQILPDPSKPSKRSFIEDLLFNKVTLADAGFIKQYGDCLGDIAARDLICAQKFNGLTVLPPLLTDEMIAQYTSALLACTITSGWTCGAGAALQIPFAMQMAYRFNGIGVTQNVLYENQKLIANQFNSAIGKIQDSLSSTASALGKLQDVVNQNAQALNTLVKQLSSNFGAISSVLNDILSRLDPPEAEVQIDRLITGRLQSLQTYVTQQLIRAAEIRASANLAATKMSECVLGQSKRVDFCGKGYHLMSFPQSAPHGVVFLHVTYVPAQEKNFTTAPAICHDGKAHFPREGVFVSNGTHWFVTQRNFYEPQIITTDNTFVSGNCDVVIGIVNNTVYDPLQPELDSFKEELDKYFKNHTSPDVDLGDISGINASVVNIQKEIDRLNEVAKNLNESLIDLQELGKYEQGSGYIPEAPRDGQAYVRKDGEWVLLSTFLGRSLEVLFQGPGSLPETGGGSDYKDDDDKGGGGSGGGGSGGGGSGGGGSGGGGSHHHHHH

SEQ ID NO: 126 - protein, 1297 aa, Artificial Sequence
  source: /note="Description of Artificial Sequence: Synthetic polypeptide"
MFVFLVLLPLVSSQCVNLTTRTQLPPAYTNSFTRGVYYPDKVFRSSVLHSTQDLFLPFFSNVTWFHAIHVSGTNGTKRFDNPVLPFNDGVYFASTEKSNIIRGWIFGTTLDSKTQSLLIVNNATNVVIKVCEFQFCNDPFLGVYYHKNNKSWMESEFRVYSSANNCTFEYVSQPFLMDLEGKQGNFKNLREFVFKNIDGYFKIYSKHTPINLVRDLPQGFSALEPLVDLPIGINITRFQTLLALHRSYLTPGDSSSGWTAGAAAYYVGYLQPRTFLLKYNENGTITDAVDCALDPLSETKCTLKSFTVEKGIYQTSNFRVQPTESIVRFPNITNLCPFGEVFNATRFASVYAWNRKRISNCVADYSVLYNSASFSTFKCYGVSPTKLNDLCFTNVYADSFVIRGDEVRQIAPGQTGKIADYNYKLPDDFTGCVIAWNSNNLDSKVGGNYNYLYRLFRKSNLKPFERDISTEIYQAGSTPCNGVEGFNCYFPLQSYGFQPTNGVGYQPYRVVVLSFELLHAPATVCGPKKSTPLVKNKCVNFNFNGLTGTGVLTESNKKFLPFQQFGRDIADTTDAVRDPQTLEILDITPCSFGGVSVITPGTNTSNQVAVLYQDVNCTEVPVAIHADQLTPTWRVYSTGSNVFQTRAGCLIGAEHVNNSYECDIPIGAGICASYQTQTNSPSRAGSVASQSIIAYTMSLGAENSVAYSNNSIAIPTNFTISVTTEILPVSMTKTSVDCTMYICGDSTECSNLLLQYGSFCTQLNRALTGIAVEQDKNTQEVFAQVKQIYKTPPIKDFGGFNFSQILPDPSKPSKRSFIEDLLFNKVTLADAGFIKQYGDCLGDIAARDLICAQKFNGLTVLPPLLTDEMIAQYTSALLAGTITCGWTFGAGACLQIPFAMQMAYRFNGIGVTQNVLYENQKLIANQFNSAIGKIQDSLSSTASALGKLQDVVNQNAQALNTLVKQLSSNFGAISSVLNDILSRLDPPEAEVQIDRLITGRLQSLQTYVTQQLIRAAEIRASANLAATKMSECVLGQSKRVDFCGKGYHLMSFPQSAPHGVVFLHVTYVPAQEKNFTTAPAICHDGKAHFPREGVFVSNGTHWFVTQRNFYEPQIITTDNTFVSGNCDVVIGIVNNTVYDPLQPELDSFKEELDKYFKNHTSPDVDLGDISGINASVVNIQKEIDRLNEVAKNLNESLIDLQELGKYEQGSGYIPEAPRDGQAYVRKDGEWVLLSTFLGRSLEVLFQGPGSLPETGGGSDYKDDDDKGGGGSGGGGSGGGGSGGGGSGGGGSHHHHHH

SEQ ID NO: 127 - protein, 1297 aa, Artificial Sequence
  source: /note="Description of Artificial Sequence: Synthetic polypeptide"
MFVFLVLLPLVSSQCVNLTTRTQLPPAYTNSFTRGVYYPDKVFRSSVLHSTQDLFLPFFSNVTWFHAIHVSGTNGTKRFDNPVLPFNDGVYFASTEKSNIIRGWIFGTTLDSKTQSLLIVNNATNVVIKVCEFQFCNDPFLGVYYHKNNKSWMESEFRVYSSANNCTFEYVSQPFLMDLEGKQGNFKNLREFVFKNIDGYFKIYSKHTPINLVRDLPQGFSALEPLVDLPIGINITRFQTLLALHRSYLTPGDSSSGWTAGAAAYYVGYLQPRTFLLKYNENGTITDAVDCALDPLSETKCTLKSFTVEKGIYQTSNFRVQPTESIVRFPNITNLCPFGEVFNATRFASVYAWNRKRISNCVADYSVLYNSASFSTFKCYGVSPTKLNDLCFTNVYADSFVIRGDEVRQIAPGQTGKIADYNYKLPDDFTGCVIAWNSNNLDSKVGGNYNYLYRLFRKSNLKPFERDISTEIYQAGSTPCNGVEGFNCYFPLQSYGFQPTNGVGYQPYRVVVLSFELLHAPATVCGPKKSTNLVKNKCVNFNFNGLTGTGVLTESNKKFLPFQQFGRDIADTTDAVRDPQTLEILDITPCSFGGVSVITPGTNTSNQVAVLYQNVNCTEVPVAIHADQLTPTWRVYSTGSNVFQTRAGCLIGAEHVNNSYECDIPIGAGICASYQTQTNSPSRAGSVASQSIIAYTMSLGAENSVAYSNNSIAIPTNFTISVTTEILPVSMTKTSVDCTMYICGDSTECSNLLLQYGSFCTQLNRALTGIAVEQDKNTQEVFAQVKQIYKTPPIKDFGGFNFSQILPDPSKPSKRSFIEDLLFNKVTLADAGFIKQYGDCLGDIAARDLICAQKFNGLTVLPPLLTDEMIAQYTSALLAGTITSGWTFGAGPALQIPFAMQMAYRFNGIGVTQNVLYENQKLIANQFNSAIGKIQDSLSSTPSALGKLQDVVNQNAQALNTLVKQLSSNFGAISSVLNDILSRLDPPEAEVQIDRLITGRLQSLQTYVTQQLIRAAEIRASANLAATKMSECVLGQSKRVDFCGKGYHLMSFPQSAPHGVVFLHVTYVPAQEKNFTTAPAICHDGKAHFPREGVFVSNGTHWFVTQRNFYEPQIITTDNTFVSGNCDVVIGIVNNTVYDPLQPELDSFKEELDKYFKNHTSPDVDLGDISGINASVVNIQKEIDRLNEVAKNLNESLIDLQELGKYEQGSGYIPEAPRDGQAYVRKDGEWVLLSTFLGRSLEVLFQGPGSLPETGGGSDYKDDDDKGGGGSGGGGSGGGGSGGGGSGGGGSHHHHHH

SEQ ID NO: 128 - protein, 1297 aa, Artificial Sequence
  source: /note="Description of Artificial Sequence: Synthetic polypeptide"
MFVFLVLLPLVSSQCVNLTTRTQLPPAYTNSFTRGVYYPDKVFRSSVLHSTQDLFLPFFSNVTWFHAIHVSGTNGTKRFDNPVLPFNDGVYFASTEKSNIIRGWIFGTTLDSKTQSLLIVNNATNVVIKVCEFQFCNDPFLGVYYHKNNKSWMESEFRVYSSANNCTFEYVSQPFLMDLEGKQGNFKNLREFVFKNIDGYFKIYSKHTPINLVRDLPQGFSALEPLVDLPIGINITRFQTLLALHRSYLTPGDSSSGWTAGAAAYYVGYLQPRTFLLKYNENGTITDAVDCALDPLSETKCTLKSFTVEKGIYQTSNFRVQPTESIVRFPNITNLCPFGEVFNATRFASVYAWNRKRISNCVADYSVLYNSASFSTFKCYGVSPTKLNDLCFTNVYADSFVIRGDEVRQIAPGQTGKIADYNYKLPDDFTGCVIAWNSNNLDSKVGGNYNYLYRLFRKSNLKPFERDISTEIYQAGSTPCNGVEGFNCYFPLQSYGFQPTNGVGYQPYRVVVLSFELLHAPATVCGPKKSTNLVKNKCVNFNFNGLTGTGVLTESNKKFLPFQQFGRDIADITDAVRDPQTLEILDITPCSFGGVSVITPGTNTSNQVAVLYQDVNCTEVPVAIHADQLTPTWRVYSTGSNVFQTRAGCLIGAEHVNNSYECDIPIGAGICASYQTQTNSPSRAGSVASQSIIAYTMSLGAENSVAYSNNSIAIPTNFTISVTTEILPVSMTKTSVDCTMYICGDSTECSNLLLQYGSFCTQLNRALTGIAVEQDKNTQEVFAQVKQIYKTPPIKDFGGFNFSQILPDPSKPSKRSFIEDLLFNKVTLADAGFIKQYGDCLGDIAARDLICAQKFNGLTVLPPLLTDEMIAQYTSALLAGTITSGWTFGAGPALQIPFAMQMAYRFNGIGVTQNVLYENQKLIANQFNSAIGKIQDSLSSTPSALGKLQDVVNQNAQALNTLVKQLSSNFGAISSVLNDILSRLDPPEAEVQIDRLITGRLQSLQTYVTQQLIRAAEIRASANLAATKMSECVLGQSKRVDFCGKGYHLMSFPQSAPHGVVFLHVTYVPAQEKNFTTAPAICHDGKAHFPREGVFVSNGTHWFVTQRNFYEPQIITTDNTFVSGNCDVVIGIVNNTVYDPLQPELDSFKEELDKYFKNHTSPDVDLGDISGINASVVNIQKEIDRLNEVAKNLNESLIDLQELGKYEQGSGYIPEAPRDGQAYVRKDGEWVLLSTFLGRSLEVLFQGPGSLPETGGGSDYKDDDDKGGGGSGGGGSGGGGSGGGGSGGGGSHHHHHH

SEQ ID NO: 129 - protein, 1297 aa, Artificial Sequence
  source: /note="Description of Artificial Sequence: Synthetic polypeptide"
MFVFLVLLPLVSSQCVNLTTRTQLPPAYTNSFTRGVYYPDKVFRSSVLHSTQDLFLPFFSNVTWFHAIHVSGTNGTKRFDNPVLPFNDGVYFASTEKSNIIRGWIFGTTLDSKTQSLLIVNNATNVVIKVCEFQFCNDPFLGVYYHKNNKSWMESEFRVYSSANNCTFEYVSQPFLMDLEGKQGNFKNLREFVFKNIDGYFKIYSKHTPINLVRDLPQGFSALEPLVDLPIGINITRFQTLLALHRSYLTPGDSSSGWTAGAAAYYVGYLQPRTFLLKYNENGTITDAVDCALDPLSETKCTLKSFTVEKGIYQTSNFRVQPTESIVRFPNITNLCPFGEVFNATRFASVYAWNRKRISNCVADYSVLYNSASFSTFKCYGVSPTKLNDLCFTNVYADSFVIRGDEVRQIAPGQTGKIADYNYKLPDDFTGCVIAWNSNNLDSKVGGNYNYLYRLFRKSNLKPFERDISTEIYQAGSTPCNGVEGFNCYFPLQSYGFQPTNGVGYQPYRVVVLSFELLHAPATVCGPKKSTPLVKNKCVNFNFNGLTGTGVLTESNKKFLPFQQFGRDIADTTDAVRDPQTLEILDITPCSFGGVSVITPGTNTSNQVAVLYQDVNCTEVPVAIHADQLTPTWRVYSTGSNVFQTRAGCLIGAEHVNNSYECDIPIGAGICASYQTQTNSPSRAGSVASQSIIAYTMSLGAENSVAYSNNSIAIPTNFTISVTTEILPVSMTKTSVDCTMYICGDSTECSNLLLQYGSFCTQLNRALTGIAVEQDKNTQEVFAQVKQIYKTPPIKDFGGFNFSQILPDPSKPSKRSFIEDLLFNKVTLADAGFIKQYGDCLGDIAARDLICAQKFNGLTVLPPLLTDEMIAQYTSALLAGTITSGWTFGAGPALQIPFAMQMAYRFNGIGVTQNVLYENQKLIANQFNSAIGKIQDSLSSTPSALGKLQDVVNQNAQALNTLVKQLSSNFGAISSVLNDILSRLDPPEAEVQIDRLITGRLQSLQTYVTQQLIRAAEIRASANLAATKMSECVLGQSKRVDFCGKGYHLMSFPQSAPHGVVFLHVTYVPAQEKNFTTAPAICHDGKAHFPREGVFVSNGTHWFVTQRNFYEPQIITTDNTFVSGNCDVVIGIVNNTVYDPLQPELDSFKEELDKYFKNHTSPDVDLGDISGINASVVNIQKEIDRLNEVAKNLNESLIDLQELGKYEQGSGYIPEAPRDGQAYVRKDGEWVLLSTFLGRSLEVLFQGPGSLPETGGGSDYKDDDDKGGGGSGGGGSGGGGSGGGGSGGGGSHHHHHH

SEQ ID NO: 130 - protein, 1297 aa, Artificial Sequence
  source: /note="Description of Artificial Sequence: Synthetic polypeptide"
MFVFLVLLPLVSSQCVNLTTRTQLPPAYTNSFTRGVYYPDKVFRSSVLHSTQDLFLPFFSNVTWFHAIHVSGTNGTKRFDNPVLPFNDGVYFASTEKSNIIRGWIFGTTLDSKTQSLLIVNNATNVVIKVCEFQFCNDPFLGVYYHKNNKSWMESEFRVYSSANNCTFEYVSQPFLMDLEGKQGNFKNLREFVFKNIDGYFKIYSKHTPINLVRDLPQGFSALEPLVDLPIGINITRFQTLLALHRSYLTPGDSSSGWTAGAAAYYVGYLQPRTFLLKYNENGTITDAVDCALDPLSETKCTLKSFTVEKGIYQTSNFRVQPTESIVRFPNITNLCPFGEVFNATRFASVYAWNRKRISNCVADYSVLYNSASFSTFKCYGVSPTKLNDLCFTNVYADSFVIRGDEVRQIAPGQTGKIADYNYKLPDDFTGCVIAWNSNNLDSKVGGNYNYLYRLFRKSNLKPFERDISTEIYQAGSTPCNGVEGFNCYFPLQSYGFQPTNGVGYQPYRVVVLSFELLHAPATVCGPKKSTNLVKNKCVNFNFNGLTGTGVLTESNKKFLPFQQFGRDIADTTDAVRDPQTLEILDITPCSFGGVSVITPGTNTSNQVAVLYQDVNCTEVPVAIHADQLTPTWRVYSTGSNVFQTRAGCLIGAEHVNNSYECDIPIGAGICASYQTQTNSPSRAGSVASQSIIAYTMSLGAENSVAYSNNSIAIPTNFTISVTTEILPVSMTKTSVDCTMYICGDSTECSNLLLQYGSFCTQLNRALTGIAVEQDKNTQEVFAQVKQIYKTPPIKDFGGFNFSQILPDPSKPSKRSFIEDLLFNKVTLADAGFIKQYGDCLGDIAARDLICAQKFNGLTVLPPLLTDEMIAQYTSALLACTITSGWTCGAGPALQIPFAMQMAYRFNGIGVTQNVLYENQKLIANQFNSAIGKIQDSLSSTPSALGKLQDVVNQNAQALNTLVKQLSSNFGAISSVLNDILSRLDPPEAEVQIDRLITGRLQSLQTYVTQQLIRAAEIRASANLAATKMSECVLGQSKRVDFCGKGYHLMSFPQSAPHGVVFLHVTYVPAQEKNFTTAPAICHDGKAHFPREGVFVSNGTHWFVTQRNFYEPQIITTDNTFVSGNCDVVIGIVNNTVYDPLQPELDSFKEELDKYFKNHTSPDVDLGDISGINASVVNIQKEIDRLNEVAKNLNESLIDLQELGKYEQGSGYIPEAPRDGQAYVRKDGEWVLLSTFLGRSLEVLFQGPGSLPETGGGSDYKDDDDKGGGGSGGGGSGGGGSGGGGSGGGGSHHHHHH

SEQ ID NO: 131 - protein, 1297 aa, Artificial Sequence
  source: /note="Description of Artificial Sequence: Synthetic polypeptide"
MFVFLVLLPLVSSQCVNLTTRTQLPPAYTNSFTRGVYYPDKVFRSSVLHSTQDLFLPFFSNVTWFHAIHVSGTNGTKRFDNPVLPFNDGVYFASTEKSNIIRGWIFGTTLDSKTQSLLIVNNATNVVIKVCEFQFCNDPFLGVYYHKNNKSWMESEFRVYSSANNCTFEYVSQPFLMDLEGKQGNFKNLREFVFKNIDGYFKIYSKHTPINLVRDLPQGFSALEPLVDLPIGINITRFQTLLALHRSYLTPGDSSSGWTAGAAAYYVGYLQPRTFLLKYNENGTITDAVDCALDPLSETKCTLKSFTVEKGIYQTSNFRVQPTESIVRFPNITNLCPFGEVFNATRFASVYAWNRKRISNCVADYSVLYNSASFSTFKCYGVSPTKLNDLCFTNVYADSFVIRGDEVRQIAPGQTGKIADYNYKLPDDFTGCVIAWNSNNLDSKVGGNYNYLYRLFRKSNLKPFERDISTEIYQAGSTPCNGVEGFNCYFPLQSYGFQPTNGVGYQPYRVVVLSFELLHAPATVCGPKKSTNLVKNKCVNFNFNGLTGTGVLTESNKKFLPFQQFGRDIADTTDAVRDPQTLEILDITPCSFGGVSVITPGTNTSNQVAVLYQDVNCTEVPVAIHADQLTPTWRVYSTGSNVFQTRAGCLIGAEHVNNSYECDIPIGAGICASYQTQTNSPSRAGSVASQSIIAYTMSLGAENSVAYSNNSIAIPTNFTISVTTEILPVSMTKTSVDCTMYICGDSTECSNLLLQYGSFCTQLNRALTGIAVEQDKNTQEVFAQVKQIYKTPPIKDFGGFNFSQILPDPSKPSKRSFIEDLLFNKVTLADAGFIKQYGDCLGDIAARDLICAQKFNGLTVLPPLLTDEMIAQYTSALLAGTITCGWTFGAGPCLQIPFAMQMAYRFNGIGVTQNVLYENQKLIANQFNSAIGKIQDSLSSTPSALGKLQDVVNQNAQALNTLVKQLSSNFGAISSVLNDILSRLDPPEAEVQIDRLITGRLQSLQTYVTQQLIRAAEIRASANLAATKMSECVLGQSKRVDFCGKGYHLMSFPQSAPHGVVFLHVTYVPAQEKNFTTAPAICHDGKAHFPREGVFVSNGTHWFVTQRNFYEPQIITTDNTFVSGNCDVVIGIVNNTVYDPLQPELDSFKEELDKYFKNHTSPDVDLGDISGINASVVNIQKEIDRLNEVAKNLNESLIDLQELGKYEQGSGYIPEAPRDGQAYVRKDGEWVLLSTFLGRSLEVLFQGPGSLPETGGGSDYKDDDDKGGGGSGGGGSGGGGSGGGGSGGGGSHHHHHH

SEQ ID NO: 132 - protein, 1297 aa, Artificial Sequence
  source: /note="Description of Artificial Sequence: Synthetic polypeptide"
MFVFLVLLPLVSSQCVNLTTRTQLPPAYTNSFTRGVYYPDKVFRSSVLHSTQDLFLPFFSNVTWFHAIHVSGTNGTKRFDNPVLPFNDGVYFASTEKSNIIRGWIFGTTLDSKTQSLLIVNNATNVVIKVCEFQFCNDPFLGVYYHKNNKSWMESEFRVYSSANNCTFEYVSQPFLMDLEGKQGNFKNLREFVFKNIDGYFKIYSKHTPINLVRDLPQGFSALEPLVDLPIGINITRFQTLLALHRSYLTPGDSSSGWTAGAAAYYVGYLQPRTFLLKYNENGTITDAVDCALDPLSETKCTLKSFTVEKGIYQTSNFRVQPTESIVRFPNITNLCPFGEVFNATRFASVYAWNRKRISNCVADYSVLYNSASFSTFKCYGVSPTKLNDLCFTNVYADSFVIRGDEVRQIAPGQTGKIADYNYKLPDDFTGCVIAWNSNNLDSKVGGNYNYLYRLFRKSNLKPFERDISTEIYQAGSTPCNGVEGFNCYFPLQSYGFQPTNGVGYQPYRVVVLSFELLHAPATVCGPKKSTNLVKNKCVNFNFNGLTGTGVLTESNKKFLPFQQFGRDIADITDAVRDPQTLEILDITPCSFGGVSVITPGTNTSNQVAVLYQNVNCTEVPVAIHADQLTPTWRVYSTGSNVFQTRAGCLIGAEHVNNSYECDIPIGAGICASYQTQTNSPSRAGSVASQSIIAYTMSLGAENSVAYSNNSIAIPTNFTISVTTEILPVSMTKTSVDCTMYICGDSTECSNLLLQYGSFCTQLNRALTGIAVEQDKNTQEVFAQVKQIYKTPPIKDFGGFNFSQILPDPSKPSKRSFIEDLLFNKVTLADAGFIKQYGDCLGDIAARDLICAQKFNGLTVLPPLLTDEMIAQYTSALLAGTITSGWTFGAGAALQIPFAMQMAYRFNGIGVTQNVLYENQKLIANQFNSAIGKIQDSLSSTPSALGKLQDVVNQNAQALNTLVKQLSSNFGAISSVLNDILSRLDPPEAEVQIDRLITGRLQSLQTYVTQQLIRAAEIRASANLAATKMSECVLGQSKRVDFCGKGYHLMSFPQSAPHGVVFLHVTYVPAQEKNFTTAPAICHDGKAHFPREGVFVSNGTHWFVTQRNFYEPQIITTDNTFVSGNCDVVIGIVNNTVYDPLQPELDSFKEELDKYFKNHTSPDVDLGDISGINASVVNIQKEIDRLNEVAKNLNESLIDLQELGKYEQGSGYIPEAPRDGQAYVRKDGEWVLLSTFLGRSLEVLFQGPGSLPETGGGSDYKDDDDKGGGGSGGGGSGGGGSGGGGSGGGGSHHHHHH

SEQ ID NO: 133 - protein, 1297 aa, Artificial Sequence
  source: /note="Description of Artificial Sequence: Synthetic polypeptide"
MFVFLVLLPLVSSQCVNLTTRTQLPPAYTNSFTRGVYYPDKVFRSSVLHSTQDLFLPFFSNVTWFHAIHVSGTNGTKRFDNPVLPFNDGVYFASTEKSNIIRGWIFGTTLDSKTQSLLIVNNATNVVIKVCEFQFCNDPFLGVYYHKNNKSWMESEFRVYSSANNCTFEYVSQPFLMDLEGKQGNFKNLREFVFKNIDGYFKIYSKHTPINLVRDLPQGFSALEPLVDLPIGINITRFQTLLALHRSYLTPGDSSSGWTAGAAAYYVGYLQPRTFLLKYNENGTITDAVDCALDPLSETKCTLKSFTVEKGIYQTSNFRVQPTESIVRFPNITNLCPFGEVFNATRFASVYAWNRKRISNCVADYSVLYNSASFSTFKCYGVSPTKLNDLCFTNVYADSFVIRGDEVRQIAPGQTGKIADYNYKLPDDFTGCVIAWNSNNLDSKVGGNYNYLYRLFRKSNLKPFERDISTEIYQAGSTPCNGVEGFNCYFPLQSYGFQPTNGVGYQPYRVVVLSFELLHAPATVCGPKKSTPLVKNKCVNFNFNGLTGTGVLTESNKKFLPFQQFGRDIADTTDAVRDPQTLEILDITPCSFGGVSVITPGTNTSNQVAVLYQNVNCTEVPVAIHADQLTPTWRVYSTGSNVFQTRAGCLIGAEHVNNSYECDIPIGAGICASYQTQTNSPSRAGSVASQSIIAYTMSLGAENSVAYSNNSIAIPTNFTISVTTEILPVSMTKTSVDCTMYICGDSTECSNLLLQYGSFCTQLNRALTGIAVEQDKNTQEVFAQVKQIYKTPPIKDFGGFNFSQILPDPSKPSKRSFIEDLLFNKVTLADAGFIKQYGDCLGDIAARDLICAQKFNGLTVLPPLLTDEMIAQYTSALLAGTITSGWTFGAGAALQIPFAMQMAYRFNGIGVTQNVLYENQKLIANQFNSAIGKIQDSLSSTPSALGKLQDVVNQNAQALNTLVKQLSSNFGAISSVLNDILSRLDPPEAEVQIDRLITGRLQSLQTYVTQQLIRAAEIRASANLAATKMSECVLGQSKRVDFCGKGYHLMSFPQSAPHGVVFLHVTYVPAQEKNFTTAPAICHDGKAHFPREGVFVSNGTHWFVTQRNFYEPQIITTDNTFVSGNCDVVIGIVNNTVYDPLQPELDSFKEELDKYFKNHTSPDVDLGDISGINASVVNIQKEIDRLNEVAKNLNESLIDLQELGKYEQGSGYIPEAPRDGQAYVRKDGEWVLLSTFLGRSLEVLFQGPGSLPETGGGSDYKDDDDKGGGGSGGGGSGGGGSGGGGSGGGGSHHHHHH

SEQ ID NO: 134 - protein, 1297 aa, Artificial Sequence
  source: /note="Description of Artificial Sequence: Synthetic polypeptide"
MFVFLVLLPLVSSQCVNLTTRTQLPPAYTNSFTRGVYYPDKVFRSSVLHSTQDLFLPFFSNVTWFHAIHVSGTNGTKRFDNPVLPFNDGVYFASTEKSNIIRGWIFGTTLDSKTQSLLIVNNATNVVIKVCEFQFCNDPFLGVYYHKNNKSWMESEFRVYSSANNCTFEYVSQPFLMDLEGKQGNFKNLREFVFKNIDGYFKIYSKHTPINLVRDLPQGFSALEPLVDLPIGINITRFQTLLALHRSYLTPGDSSSGWTAGAAAYYVGYLQPRTFLLKYNENGTITDAVDCALDPLSETKCTLKSFTVEKGIYQTSNFRVQPTESIVRFPNITNLCPFGEVFNATRFASVYAWNRKRISNCVADYSVLYNSASFSTFKCYGVSPTKLNDLCFTNVYADSFVIRGDEVRQIAPGQTGKIADYNYKLPDDFTGCVIAWNSNNLDSKVGGNYNYLYRLFRKSNLKPFERDISTEIYQAGSTPCNGVEGFNCYFPLQSYGFQPTNGVGYQPYRVVVLSFELLHAPATVCGPKKSTNLVKNKCVNFNFNGLTGTGVLTESNKKFLPFQQFGRDIADTTDAVRDPQTLEILDITPCSFGGVSVITPGTNTSNQVAVLYQNVNCTEVPVAIHADQLTPTWRVYSTGSNVFQTRAGCLIGAEHVNNSYECDIPIGAGICASYQTQTNSPSRAGSVASQSIIAYTMSLGAENSVAYSNNSIAIPTNFTISVTTEILPVSMTKTSVDCTMYICGDSTECSNLLLQYGSFCTQLNRALTGIAVEQDKNTQEVFAQVKQIYKTPPIKDFGGFNFSQILPDPSKPSKRSFIEDLLFNKVTLADAGFIKQYGDCLGDIAARDLICAQKFNGLTVLPPLLTDEMIAQYTSALLACTITSGWTCGAGAALQIPFAMQMAYRFNGIGVTQNVLYENQKLIANQFNSAIGKIQDSLSSTPSALGKLQDVVNQNAQALNTLVKQLSSNFGAISSVLNDILSRLDPPEAEVQIDRLITGRLQSLQTYVTQQLIRAAEIRASANLAATKMSECVLGQSKRVDFCGKGYHLMSFPQSAPHGVVFLHVTYVPAQEKNFTTAPAICHDGKAHFPREGVFVSNGTHWFVTQRNFYEPQIITTDNTFVSGNCDVVIGIVNNTVYDPLQPELDSFKEELDKYFKNHTSPDVDLGDISGINASVVNIQKEIDRLNEVAKNLNESLIDLQELGKYEQGSGYIPEAPRDGQAYVRKDGEWVLLSTFLGRSLEVLFQGPGSLPETGGGSDYKDDDDKGGGGSGGGGSGGGGSGGGGSGGGGSHHHHHH

SEQ ID NO: 135 - protein, 1297 aa, Artificial Sequence
  source: /note="Description of Artificial Sequence: Synthetic polypeptide"
MFVFLVLLPLVSSQCVNLTTRTQLPPAYTNSFTRGVYYPDKVFRSSVLHSTQDLFLPFFSNVTWFHAIHVSGTNGTKRFDNPVLPFNDGVYFASTEKSNIIRGWIFGTTLDSKTQSLLIVNNATNVVIKVCEFQFCNDPFLGVYYHKNNKSWMESEFRVYSSANNCTFEYVSQPFLMDLEGKQGNFKNLREFVFKNIDGYFKIYSKHTPINLVRDLPQGFSALEPLVDLPIGINITRFQTLLALHRSYLTPGDSSSGWTAGAAAYYVGYLQPRTFLLKYNENGTITDAVDCALDPLSETKCTLKSFTVEKGIYQTSNFRVQPTESIVRFPNITNLCPFGEVFNATRFASVYAWNRKRISNCVADYSVLYNSASFSTFKCYGVSPTKLNDLCFTNVYADSFVIRGDEVRQIAPGQTGKIADYNYKLPDDFTGCVIAWNSNNLDSKVGGNYNYLYRLFRKSNLKPFERDISTEIYQAGSTPCNGVEGFNCYFPLQSYGFQPTNGVGYQPYRVVVLSFELLHAPATVCGPKKSTNLVKNKCVNFNFNGLTGTGVLTESNKKFLPFQQFGRDIADTTDAVRDPQTLEILDITPCSFGGVSVITPGTNTSNQVAVLYQNVNCTEVPVAIHADQLTPTWRVYSTGSNVFQTRAGCLIGAEHVNNSYECDIPIGAGICASYQTQTNSPSRAGSVASQSIIAYTMSLGAENSVAYSNNSIAIPTNFTISVTTEILPVSMTKTSVDCTMYICGDSTECSNLLLQYGSFCTQLNRALTGIAVEQDKNTQEVFAQVKQIYKTPPIKDFGGFNFSQILPDPSKPSKRSFIEDLLFNKVTLADAGFIKQYGDCLGDIAARDLICAQKFNGLTVLPPLLTDEMIAQYTSALLAGTITCGWTFGAGACLQIPFAMQMAYRFNGIGVTQNVLYENQKLIANQFNSAIGKIQDSLSSTPSALGKLQDVVNQNAQALNTLVKQLSSNFGAISSVLNDILSRLDPPEAEVQIDRLITGRLQSLQTYVTQQLIRAAEIRASANLAATKMSECVLGQSKRVDFCGKGYHLMSFPQSAPHGVVFLHVTYVPAQEKNFTTAPAICHDGKAHFPREGVFVSNGTHWFVTQRNFYEPQIITTDNTFVSGNCDVVIGIVNNTVYDPLQPELDSFKEELDKYFKNHTSPDVDLGDISGINASVVNIQKEIDRLNEVAKNLNESLIDLQELGKYEQGSGYIPEAPRDGQAYVRKDGEWVLLSTFLGRSLEVLFQGPGSLPETGGGSDYKDDDDKGGGGSGGGGSGGGGSGGGGSGGGGSHHHHHH

SEQ ID NO: 136 - protein, 1297 aa, Artificial Sequence
  source: /note="Description of Artificial Sequence: Synthetic polypeptide"
MFVFLVLLPLVSSQCVNLTTRTQLPPAYTNSFTRGVYYPDKVFRSSVLHSTQDLFLPFFSNVTWFHAIHVSGTNGTKRFDNPVLPFNDGVYFASTEKSNIIRGWIFGTTLDSKTQSLLIVNNATNVVIKVCEFQFCNDPFLGVYYHKNNKSWMESEFRVYSSANNCTFEYVSQPFLMDLEGKQGNFKNLREFVFKNIDGYFKIYSKHTPINLVRDLPQGFSALEPLVDLPIGINITRFQTLLALHRSYLTPGDSSSGWTAGAAAYYVGYLQPRTFLLKYNENGTITDAVDCALDPLSETKCTLKSFTVEKGIYQTSNFRVQPTESIVRFPNITNLCPFGEVFNATRFASVYAWNRKRISNCVADYSVLYNSASFSTFKCYGVSPTKLNDLCFTNVYADSFVIRGDEVRQIAPGQTGKIADYNYKLPDDFTGCVIAWNSNNLDSKVGGNYNYLYRLFRKSNLKPFERDISTEIYQAGSTPCNGVEGFNCYFPLQSYGFQPTNGVGYQPYRVVVLSFELLHAPATVCGPKKSTPLVKNKCVNFNFNGLTGTGVLTESNKKFLPFQQFGRDIADITDAVRDPQTLEILDITPCSFGGVSVITPGTNTSNQVAVLYQDVNCTEVPVAIHADQLTPTWRVYSTGSNVFQTRAGCLIGAEHVNNSYECDIPIGAGICASYQTQTNSPSRAGSVASQSIIAYTMSLGAENSVAYSNNSIAIPTNFTISVTTEILPVSMTKTSVDCTMYICGDSTECSNLLLQYGSFCTQLNRALTGIAVEQDKNTQEVFAQVKQIYKTPPIKDFGGFNFSQILPDPSKPSKRSFIEDLLFNKVTLADAGFIKQYGDCLGDIAARDLICAQKFNGLTVLPPLLTDEMIAQYTSALLAGTITSGWTFGAGAALQIPFAMQMAYRFNGIGVTQNVLYENQKLIANQFNSAIGKIQDSLSSTPSALGKLQDVVNQNAQALNTLVKQLSSNFGAISSVLNDILSRLDPPEAEVQIDRLITGRLQSLQTYVTQQLIRAAEIRASANLAATKMSECVLGQSKRVDFCGKGYHLMSFPQSAPHGVVFLHVTYVPAQEKNFTTAPAICHDGKAHFPREGVFVSNGTHWFVTQRNFYEPQIITTDNTFVSGNCDVVIGIVNNTVYDPLQPELDSFKEELDKYFKNHTSPDVDLGDISGINASVVNIQKEIDRLNEVAKNLNESLIDLQELGKYEQGSGYIPEAPRDGQAYVRKDGEWVLLSTFLGRSLEVLFQGPGSLPETGGGSDYKDDDDKGGGGSGGGGSGGGGSGGGGSGGGGSHHHHHH

SEQ ID NO: 137 - protein, 1297 aa, Artificial Sequence
  source: /note="Description of Artificial Sequence: Synthetic polypeptide"
MFVFLVLLPLVSSQCVNLTTRTQLPPAYTNSFTRGVYYPDKVFRSSVLHSTQDLFLPFFSNVTWFHAIHVSGTNGTKRFDNPVLPFNDGVYFASTEKSNIIRGWIFGTTLDSKTQSLLIVNNATNVVIKVCEFQFCNDPFLGVYYHKNNKSWMESEFRVYSSANNCTFEYVSQPFLMDLEGKQGNFKNLREFVFKNIDGYFKIYSKHTPINLVRDLPQGFSALEPLVDLPIGINITRFQTLLALHRSYLTPGDSSSGWTAGAAAYYVGYLQPRTFLLKYNENGTITDAVDCALDPLSETKCTLKSFTVEKGIYQTSNFRVQPTESIVRFPNITNLCPFGEVFNATRFASVYAWNRKRISNCVADYSVLYNSASFSTFKCYGVSPTKLNDLCFTNVYADSFVIRGDEVRQIAPGQTGKIADYNYKLPDDFTGCVIAWNSNNLDSKVGGNYNYLYRLFRKSNLKPFERDISTEIYQAGSTPCNGVEGFNCYFPLQSYGFQPTNGVGYQPYRVVVLSFELLHAPATVCGPKKSTNLVKNKCVNFNFNGLTGTGVLTESNKKFLPFQQFGRDIADITDAVRDPQTLEILDITPCSFGGVSVITPGTNTSNQVAVLYQDVNCTEVPVAIHADQLTPTWRVYSTGSNVFQTRAGCLIGAEHVNNSYECDIPIGAGICASYQTQTNSPSRAGSVASQSIIAYTMSLGAENSVAYSNNSIAIPTNFTISVTTEILPVSMTKTSVDCTMYICGDSTECSNLLLQYGSFCTQLNRALTGIAVEQDKNTQEVFAQVKQIYKTPPIKDFGGFNFSQILPDPSKPSKRSFIEDLLFNKVTLADAGFIKQYGDCLGDIAARDLICAQKFNGLTVLPPLLTDEMIAQYTSALLACTITSGWTCGAGAALQIPFAMQMAYRFNGIGVTQNVLYENQKLIANQFNSAIGKIQDSLSSTPSALGKLQDVVNQNAQALNTLVKQLSSNFGAISSVLNDILSRLDPPEAEVQIDRLITGRLQSLQTYVTQQLIRAAEIRASANLAATKMSECVLGQSKRVDFCGKGYHLMSFPQSAPHGVVFLHVTYVPAQEKNFTTAPAICHDGKAHFPREGVFVSNGTHWFVTQRNFYEPQIITTDNTFVSGNCDVVIGIVNNTVYDPLQPELDSFKEELDKYFKNHTSPDVDLGDISGINASVVNIQKEIDRLNEVAKNLNESLIDLQELGKYEQGSGYIPEAPRDGQAYVRKDGEWVLLSTFLGRSLEVLFQGPGSLPETGGGSDYKDDDDKGGGGSGGGGSGGGGSGGGGSGGGGSHHHHHH

SEQ ID NO: 138 - protein, 1297 aa, Artificial Sequence
  source: /note="Description of Artificial Sequence: Synthetic polypeptide"
MFVFLVLLPLVSSQCVNLTTRTQLPPAYTNSFTRGVYYPDKVFRSSVLHSTQDLFLPFFSNVTWFHAIHVSGTNGTKRFDNPVLPFNDGVYFASTEKSNIIRGWIFGTTLDSKTQSLLIVNNATNVVIKVCEFQFCNDPFLGVYYHKNNKSWMESEFRVYSSANNCTFEYVSQPFLMDLEGKQGNFKNLREFVFKNIDGYFKIYSKHTPINLVRDLPQGFSALEPLVDLPIGINITRFQTLLALHRSYLTPGDSSSGWTAGAAAYYVGYLQPRTFLLKYNENGTITDAVDCALDPLSETKCTLKSFTVEKGIYQTSNFRVQPTESIVRFPNITNLCPFGEVFNATRFASVYAWNRKRISNCVADYSVLYNSASFSTFKCYGVSPTKLNDLCFTNVYADSFVIRGDEVRQIAPGQTGKIADYNYKLPDDFTGCVIAWNSNNLDSKVGGNYNYLYRLFRKSNLKPFERDISTEIYQAGSTPCNGVEGFNCYFPLQSYGFQPTNGVGYQPYRVVVLSFELLHAPATVCGPKKSTNLVKNKCVNFNFNGLTGTGVLTESNKKFLPFQQFGRDIADITDAVRDPQTLEILDITPCSFGGVSVITPGTNTSNQVAVLYQDVNCTEVPVAIHADQLTPTWRVYSTGSNVFQTRAGCLIGAEHVNNSYECDIPIGAGICASYQTQTNSPSRAGSVASQSIIAYTMSLGAENSVAYSNNSIAIPTNFTISVTTEILPVSMTKTSVDCTMYICGDSTECSNLLLQYGSFCTQLNRALTGIAVEQDKNTQEVFAQVKQIYKTPPIKDFGGFNFSQILPDPSKPSKRSFIEDLLFNKVTLADAGFIKQYGDCLGDIAARDLICAQKFNGLTVLPPLLTDEMIAQYTSALLAGTITCGWTFGAGACLQIPFAMQMAYRFNGIGVTQNVLYENQKLIANQFNSAIGKIQDSLSSTPSALGKLQDVVNQNAQALNTLVKQLSSNFGAISSVLNDILSRLDPPEAEVQIDRLITGRLQSLQTYVTQQLIRAAEIRASANLAATKMSECVLGQSKRVDFCGKGYHLMSFPQSAPHGVVFLHVTYVPAQEKNFTTAPAICHDGKAHFPREGVFVSNGTHWFVTQRNFYEPQIITTDNTFVSGNCDVVIGIVNNTVYDPLQPELDSFKEELDKYFKNHTSPDVDLGDISGINASVVNIQKEIDRLNEVAKNLNESLIDLQELGKYEQGSGYIPEAPRDGQAYVRKDGEWVLLSTFLGRSLEVLFQGPGSLPETGGGSDYKDDDDKGGGGSGGGGSGGGGSGGGGSGGGGSHHHHHH

SEQ ID NO: 139 - protein, 1297 aa, Artificial Sequence
  source: /note="Description of Artificial Sequence: Synthetic polypeptide"
MFVFLVLLPLVSSQCVNLTTRTQLPPAYTNSFTRGVYYPDKVFRSSVLHSTQDLFLPFFSNVTWFHAIHVSGTNGTKRFDNPVLPFNDGVYFASTEKSNIIRGWIFGTTLDSKTQSLLIVNNATNVVIKVCEFQFCNDPFLGVYYHKNNKSWMESEFRVYSSANNCTFEYVSQPFLMDLEGKQGNFKNLREFVFKNIDGYFKIYSKHTPINLVRDLPQGFSALEPLVDLPIGINITRFQTLLALHRSYLTPGDSSSGWTAGAAAYYVGYLQPRTFLLKYNENGTITDAVDCALDPLSETKCTLKSFTVEKGIYQTSNFRVQPTESIVRFPNITNLCPFGEVFNATRFASVYAWNRKRISNCVADYSVLYNSASFSTFKCYGVSPTKLNDLCFTNVYADSFVIRGDEVRQIAPGQTGKIADYNYKLPDDFTGCVIAWNSNNLDSKVGGNYNYLYRLFRKSNLKPFERDISTEIYQAGSTPCNGVEGFNCYFPLQSYGFQPTNGVGYQPYRVVVLSFELLHAPATVCGPKKSTPLVKNKCVNFNFNGLTGTGVLTESNKKFLPFQQFGRDIADTTDAVRDPQTLEILDITPCSFGGVSVITPGTNTSNQVAVLYQDVNCTEVPVAIHADQLTPTWRVYSTGSNVFQTRAGCLIGAEHVNNSYECDIPIGAGICASYQTQTNSPSRAGSVASQSIIAYTMSLGAENSVAYSNNSIAIPTNFTISVTTEILPVSMTKTSVDCTMYICGDSTECSNLLLQYGSFCTQLNRALTGIAVEQDKNTQEVFAQVKQIYKTPPIKDFGGFNFSQILPDPSKPSKRSFIEDLLFNKVTLADAGFIKQYGDCLGDIAARDLICAQKFNGLTVLPPLLTDEMIAQYTSALLACTITSGWTCGAGAALQIPFAMQMAYRFNGIGVTQNVLYENQKLIANQFNSAIGKIQDSLSSTPSALGKLQDVVNQNAQALNTLVKQLSSNFGAISSVLNDILSRLDPPEAEVQIDRLITGRLQSLQTYVTQQLIRAAEIRASANLAATKMSECVLGQSKRVDFCGKGYHLMSFPQSAPHGVVFLHVTYVPAQEKNFTTAPAICHDGKAHFPREGVFVSNGTHWFVTQRNFYEPQIITTDNTFVSGNCDVVIGIVNNTVYDPLQPELDSFKEELDKYFKNHTSPDVDLGDISGINASVVNIQKEIDRLNEVAKNLNESLIDLQELGKYEQGSGYIPEAPRDGQAYVRKDGEWVLLSTFLGRSLEVLFQGPGSLPETGGGSDYKDDDDKGGGGSGGGGSGGGGSGGGGSGGGGSHHHHHH

SEQ ID NO: 140 - protein, 1297 aa, Artificial Sequence
  source: /note="Description of Artificial Sequence: Synthetic polypeptide"
MFVFLVLLPLVSSQCVNLTTRTQLPPAYTNSFTRGVYYPDKVFRSSVLHSTQDLFLPFFSNVTWFHAIHVSGTNGTKRFDNPVLPFNDGVYFASTEKSNIIRGWIFGTTLDSKTQSLLIVNNATNVVIKVCEFQFCNDPFLGVYYHKNNKSWMESEFRVYSSANNCTFEYVSQPFLMDLEGKQGNFKNLREFVFKNIDGYFKIYSKHTPINLVRDLPQGFSALEPLVDLPIGINITRFQTLLALHRSYLTPGDSSSGWTAGAAAYYVGYLQPRTFLLKYNENGTITDAVDCALDPLSETKCTLKSFTVEKGIYQTSNFRVQPTESIVRFPNITNLCPFGEVFNATRFASVYAWNRKRISNCVADYSVLYNSASFSTFKCYGVSPTKLNDLCFTNVYADSFVIRGDEVRQIAPGQTGKIADYNYKLPDDFTGCVIAWNSNNLDSKVGGNYNYLYRLFRKSNLKPFERDISTEIYQAGSTPCNGVEGFNCYFPLQSYGFQPTNGVGYQPYRVVVLSFELLHAPATVCGPKKSTPLVKNKCVNFNFNGLTGTGVLTESNKKFLPFQQFGRDIADTTDAVRDPQTLEILDITPCSFGGVSVITPGTNTSNQVAVLYQDVNCTEVPVAIHADQLTPTWRVYSTGSNVFQTRAGCLIGAEHVNNSYECDIPIGAGICASYQTQTNSPSRAGSVASQSIIAYTMSLGAENSVAYSNNSIAIPTNFTISVTTEILPVSMTKTSVDCTMYICGDSTECSNLLLQYGSFCTQLNRALTGIAVEQDKNTQEVFAQVKQIYKTPPIKDFGGFNFSQILPDPSKPSKRSFIEDLLFNKVTLADAGFIKQYGDCLGDIAARDLICAQKFNGLTVLPPLLTDEMIAQYTSALLAGTITCGWTFGAGACLQIPFAMQMAYRFNGIGVTQNVLYENQKLIANQFNSAIGKIQDSLSSTPSALGKLQDVVNQNAQALNTLVKQLSSNFGAISSVLNDILSRLDPPEAEVQIDRLITGRLQSLQTYVTQQLIRAAEIRASANLAATKMSECVLGQSKRVDFCGKGYHLMSFPQSAPHGVVFLHVTYVPAQEKNFTTAPAICHDGKAHFPREGVFVSNGTHWFVTQRNFYEPQIITTDNTFVSGNCDVVIGIVNNTVYDPLQPELDSFKEELDKYFKNHTSPDVDLGDISGINASVVNIQKEIDRLNEVAKNLNESLIDLQELGKYEQGSGYIPEAPRDGQAYVRKDGEWVLLSTFLGRSLEVLFQGPGSLPETGGGSDYKDDDDKGGGGSGGGGSGGGGSGGGGSGGGGSHHHHHH

SEQ ID NO: 141 - protein, 1297 aa, Artificial Sequence
  source: /note="Description of Artificial Sequence: Synthetic polypeptide"
MFVFLVLLPLVSSQCVNLTTRTQLPPAYTNSFTRGVYYPDKVFRSSVLHSTQDLFLPFFSNVTWFHAIHVSGTNGTKRFDNPVLPFNDGVYFASTEKSNIIRGWIFGTTLDSKTQSLLIVNNATNVVIKVCEFQFCNDPFLGVYYHKNNKSWMESEFRVYSSANNCTFEYVSQPFLMDLEGKQGNFKNLREFVFKNIDGYFKIYSKHTPINLVRDLPQGFSALEPLVDLPIGINITRFQTLLALHRSYLTPGDSSSGWTAGAAAYYVGYLQPRTFLLKYNENGTITDAVDCALDPLSETKCTLKSFTVEKGIYQTSNFRVQPTESIVRFPNITNLCPFGEVFNATRFASVYAWNRKRISNCVADYSVLYNSASFSTFKCYGVSPTKLNDLCFTNVYADSFVIRGDEVRQIAPGQTGKIADYNYKLPDDFTGCVIAWNSNNLDSKVGGNYNYLYRLFRKSNLKPFERDISTEIYQAGSTPCNGVEGFNCYFPLQSYGFQPTNGVGYQPYRVVVLSFELLHAPATVCGPKKSTNLVKNKCVNFNFNGLTGTGVLTESNKKFLPFQQFGRDIADITDAVRDPQTLEILDITPCSFGGVSVITPGTNTSNQVAVLYQNVNCTEVPVAIHADQLTPTWRVYSTGSNVFQTRAGCLIGAEHVNNSYECDIPIGAGICASYQTQTNSPSRAGSVASQSIIAYTMSLGAENSVAYSNNSIAIPTNFTISVTTEILPVSMTKTSVDCTMYICGDSTECSNLLLQYGSFCTQLNRALTGIAVEQDKNTQEVFAQVKQIYKTPPIKDFGGFNFSQILPDPSKPSKRSFIEDLLFNKVTLADAGFIKQYGDCLGDIAARDLICAQKFNGLTVLPPLLTDEMIAQYTSALLAGTITSGWTFGAGPALQIPFAMQMAYRFNGIGVTQNVLYENQKLIANQFNSAIGKIQDSLSSTASALGKLQDVVNQNAQALNTLVKQLSSNFGAISSVLNDILSRLDPPEAEVQIDRLITGRLQSLQTYVTQQLIRAAEIRASANLAATKMSECVLGQSKRVDFCGKGYHLMSFPQSAPHGVVFLHVTYVPAQEKNFTTAPAICHDGKAHFPREGVFVSNGTHWFVTQRNFYEPQIITTDNTFVSGNCDVVIGIVNNTVYDPLQPELDSFKEELDKYFKNHTSPDVDLGDISGINASVVNIQKEIDRLNEVAKNLNESLIDLQELGKYEQGSGYIPEAPRDGQAYVRKDGEWVLLSTFLGRSLEVLFQGPGSLPETGGGSDYKDDDDKGGGGSGGGGSGGGGSGGGGSGGGGSHHHHHH

SEQ ID NO: 142 - protein, 1297 aa, Artificial Sequence
  source: /note="Description of Artificial Sequence: Synthetic polypeptide"
MFVFLVLLPLVSSQCVNLTTRTQLPPAYTNSFTRGVYYPDKVFRSSVLHSTQDLFLPFFSNVTWFHAIHVSGTNGTKRFDNPVLPFNDGVYFASTEKSNIIRGWIFGTTLDSKTQSLLIVNNATNVVIKVCEFQFCNDPFLGVYYHKNNKSWMESEFRVYSSANNCTFEYVSQPFLMDLEGKQGNFKNLREFVFKNIDGYFKIYSKHTPINLVRDLPQGFSALEPLVDLPIGINITRFQTLLALHRSYLTPGDSSSGWTAGAAAYYVGYLQPRTFLLKYNENGTITDAVDCALDPLSETKCTLKSFTVEKGIYQTSNFRVQPTESIVRFPNITNLCPFGEVFNATRFASVYAWNRKRISNCVADYSVLYNSASFSTFKCYGVSPTKLNDLCFTNVYADSFVIRGDEVRQIAPGQTGKIADYNYKLPDDFTGCVIAWNSNNLDSKVGGNYNYLYRLFRKSNLKPFERDISTEIYQAGSTPCNGVEGFNCYFPLQSYGFQPTNGVGYQPYRVVVLSFELLHAPATVCGPKKSTPLVKNKCVNFNFNGLTGTGVLTESNKKFLPFQQFGRDIADTTDAVRDPQTLEILDITPCSFGGVSVITPGTNTSNQVAVLYQNVNCTEVPVAIHADQLTPTWRVYSTGSNVFQTRAGCLIGAEHVNNSYECDIPIGAGICASYQTQTNSPSRAGSVASQSIIAYTMSLGAENSVAYSNNSIAIPTNFTISVTTEILPVSMTKTSVDCTMYICGDSTECSNLLLQYGSFCTQLNRALTGIAVEQDKNTQEVFAQVKQIYKTPPIKDFGGFNFSQILPDPSKPSKRSFIEDLLFNKVTLADAGFIKQYGDCLGDIAARDLICAQKFNGLTVLPPLLTDEMIAQYTSALLAGTITSGWTFGAGPALQIPFAMQMAYRFNGIGVTQNVLYENQKLIANQFNSAIGKIQDSLSSTASALGKLQDVVNQNAQALNTLVKQLSSNFGAISSVLNDILSRLDPPEAEVQIDRLITGRLQSLQTYVTQQLIRAAEIRASANLAATKMSECVLGQSKRVDFCGKGYHLMSFPQSAPHGVVFLHVTYVPAQEKNFTTAPAICHDGKAHFPREGVFVSNGTHWFVTQRNFYEPQIITTDNTFVSGNCDVVIGIVNNTVYDPLQPELDSFKEELDKYFKNHTSPDVDLGDISGINASVVNIQKEIDRLNEVAKNLNESLIDLQELGKYEQGSGYIPEAPRDGQAYVRKDGEWVLLSTFLGRSLEVLFQGPGSLPETGGGSDYKDDDDKGGGGSGGGGSGGGGSGGGGSGGGGSHHHHHH

SEQ ID NO: 143 - protein, 1297 aa, Artificial Sequence
  source: /note="Description of Artificial Sequence: Synthetic polypeptide"
MFVFLVLLPLVSSQCVNLTTRTQLPPAYTNSFTRGVYYPDKVFRSSVLHSTQDLFLPFFSNVTWFHAIHVSGTNGTKRFDNPVLPFNDGVYFASTEKSNIIRGWIFGTTLDSKTQSLLIVNNATNVVIKVCEFQFCNDPFLGVYYHKNNKSWMESEFRVYSSANNCTFEYVSQPFLMDLEGKQGNFKNLREFVFKNIDGYFKIYSKHTPINLVRDLPQGFSALEPLVDLPIGINITRFQTLLALHRSYLTPGDSSSGWTAGAAAYYVGYLQPRTFLLKYNENGTITDAVDCALDPLSETKCTLKSFTVEKGIYQTSNFRVQPTESIVRFPNITNLCPFGEVFNATRFASVYAWNRKRISNCVADYSVLYNSASFSTFKCYGVSPTKLNDLCFTNVYADSFVIRGDEVRQIAPGQTGKIADYNYKLPDDFTGCVIAWNSNNLDSKVGGNYNYLYRLFRKSNLKPFERDISTEIYQAGSTPCNGVEGFNCYFPLQSYGFQPTNGVGYQPYRVVVLSFELLHAPATVCGPKKSTNLVKNKCVNFNFNGLTGTGVLTESNKKFLPFQQFGRDIADTTDAVRDPQTLEILDITPCSFGGVSVITPGTNTSNQVAVLYQNVNCTEVPVAIHADQLTPTWRVYSTGSNVFQTRAGCLIGAEHVNNSYECDIPIGAGICASYQTQTNSPSRAGSVASQSIIAYTMSLGAENSVAYSNNSIAIPTNFTISVTTEILPVSMTKTSVDCTMYICGDSTECSNLLLQYGSFCTQLNRALTGIAVEQDKNTQEVFAQVKQIYKTPPIKDFGGFNFSQILPDPSKPSKRSFIEDLLFNKVTLADAGFIKQYGDCLGDIAARDLICAQKFNGLTVLPPLLTDEMIAQYTSALLACTITSGWTCGAGPALQIPFAMQMAYRFNGIGVTQNVLYENQKLIANQFNSAIGKIQDSLSSTASALGKLQDVVNQNAQALNTLVKQLSSNFGAISSVLNDILSRLDPPEAEVQIDRLITGRLQSLQTYVTQQLIRAAEIRASANLAATKMSECVLGQSKRVDFCGKGYHLMSFPQSAPHGVVFLHVTYVPAQEKNFTTAPAICHDGKAHFPREGVFVSNGTHWFVTQRNFYEPQIITTDNTFVSGNCDVVIGIVNNTVYDPLQPELDSFKEELDKYFKNHTSPDVDLGDISGINASVVNIQKEIDRLNEVAKNLNESLIDLQELGKYEQGSGYIPEAPRDGQAYVRKDGEWVLLSTFLGRSLEVLFQGPGSLPETGGGSDYKDDDDKGGGGSGGGGSGGGGSGGGGSGGGGSHHHHHH

SEQ ID NO: 144 - protein, 1297 aa, Artificial Sequence
  source: /note="Description of Artificial Sequence: Synthetic polypeptide"
MFVFLVLLPLVSSQCVNLTTRTQLPPAYTNSFTRGVYYPDKVFRSSVLHSTQDLFLPFFSNVTWFHAIHVSGTNGTKRFDNPVLPFNDGVYFASTEKSNIIRGWIFGTTLDSKTQSLLIVNNATNVVIKVCEFQFCNDPFLGVYYHKNNKSWMESEFRVYSSANNCTFEYVSQPFLMDLEGKQGNFKNLREFVFKNIDGYFKIYSKHTPINLVRDLPQGFSALEPLVDLPIGINITRFQTLLALHRSYLTPGDSSSGWTAGAAAYYVGYLQPRTFLLKYNENGTITDAVDCALDPLSETKCTLKSFTVEKGIYQTSNFRVQPTESIVRFPNITNLCPFGEVFNATRFASVYAWNRKRISNCVADYSVLYNSASFSTFKCYGVSPTKLNDLCFTNVYADSFVIRGDEVRQIAPGQTGKIADYNYKLPDDFTGCVIAWNSNNLDSKVGGNYNYLYRLFRKSNLKPFERDISTEIYQAGSTPCNGVEGFNCYFPLQSYGFQPTNGVGYQPYRVVVLSFELLHAPATVCGPKKSTNLVKNKCVNFNFNGLTGTGVLTESNKKFLPFQQFGRDIADTTDAVRDPQTLEILDITPCSFGGVSVITPGTNTSNQVAVLYQNVNCTEVPVAIHADQLTPTWRVYSTGSNVFQTRAGCLIGAEHVNNSYECDIPIGAGICASYQTQTNSPSRAGSVASQSIIAYTMSLGAENSVAYSNNSIAIPTNFTISVTTEILPVSMTKTSVDCTMYICGDSTECSNLLLQYGSFCTQLNRALTGIAVEQDKNTQEVFAQVKQIYKTPPIKDFGGFNFSQILPDPSKPSKRSFIEDLLFNKVTLADAGFIKQYGDCLGDIAARDLICAQKFNGLTVLPPLLTDEMIAQYTSALLAGTITCGWTFGAGPCLQIPFAMQMAYRFNGIGVTQNVLYENQKLIANQFNSAIGKIQDSLSSTASALGKLQDVVNQNAQALNTLVKQLSSNFGAISSVLNDILSRLDPPEAEVQIDRLITGRLQSLQTYVTQQLIRAAEIRASANLAATKMSECVLGQSKRVDFCGKGYHLMSFPQSAPHGVVFLHVTYVPAQEKNFTTAPAICHDGKAHFPREGVFVSNGTHWFVTQRNFYEPQIITTDNTFVSGNCDVVIGIVNNTVYDPLQPELDSFKEELDKYFKNHTSPDVDLGDISGINASVVNIQKEIDRLNEVAKNLNESLIDLQELGKYEQGSGYIPEAPRDGQAYVRKDGEWVLLSTFLGRSLEVLFQGPGSLPETGGGSDYKDDDDKGGGGSGGGGSGGGGSGGGGSGGGGSHHHHHH

SEQ ID NO: 145 - protein, 1297 aa, Artificial Sequence
  source: /note="Description of Artificial Sequence: Synthetic polypeptide"
MFVFLVLLPLVSSQCVNLTTRTQLPPAYTNSFTRGVYYPDKVFRSSVLHSTQDLFLPFFSNVTWFHAIHVSGTNGTKRFDNPVLPFNDGVYFASTEKSNIIRGWIFGTTLDSKTQSLLIVNNATNVVIKVCEFQFCNDPFLGVYYHKNNKSWMESEFRVYSSANNCTFEYVSQPFLMDLEGKQGNFKNLREFVFKNIDGYFKIYSKHTPINLVRDLPQGFSALEPLVDLPIGINITRFQTLLALHRSYLTPGDSSSGWTAGAAAYYVGYLQPRTFLLKYNENGTITDAVDCALDPLSETKCTLKSFTVEKGIYQTSNFRVQPTESIVRFPNITNLCPFGEVFNATRFASVYAWNRKRISNCVADYSVLYNSASFSTFKCYGVSPTKLNDLCFTNVYADSFVIRGDEVRQIAPGQTGKIADYNYKLPDDFTGCVIAWNSNNLDSKVGGNYNYLYRLFRKSNLKPFERDISTEIYQAGSTPCNGVEGFNCYFPLQSYGFQPTNGVGYQPYRVVVLSFELLHAPATVCGPKKSTPLVKNKCVNFNFNGLTGTGVLTESNKKFLPFQQFGRDIADITDAVRDPQTLEILDITPCSFGGVSVITPGTNTSNQVAVLYQDVNCTEVPVAIHADQLTPTWRVYSTGSNVFQTRAGCLIGAEHVNNSYECDIPIGAGICASYQTQTNSPSRAGSVASQSIIAYTMSLGAENSVAYSNNSIAIPTNFTISVTTEILPVSMTKTSVDCTMYICGDSTECSNLLLQYGSFCTQLNRALTGIAVEQDKNTQEVFAQVKQIYKTPPIKDFGGFNFSQILPDPSKPSKRSFIEDLLFNKVTLADAGFIKQYGDCLGDIAARDLICAQKFNGLTVLPPLLTDEMIAQYTSALLAGTITSGWTFGAGPALQIPFAMQMAYRFNGIGVTQNVLYENQKLIANQFNSAIGKIQDSLSSTASALGKLQDVVNQNAQALNTLVKQLSSNFGAISSVLNDILSRLDPPEAEVQIDRLITGRLQSLQTYVTQQLIRAAEIRASANLAATKMSECVLGQSKRVDFCGKGYHLMSFPQSAPHGVVFLHVTYVPAQEKNFTTAPAICHDGKAHFPREGVFVSNGTHWFVTQRNFYEPQIITTDNTFVSGNCDVVIGIVNNTVYDPLQPELDSFKEELDKYFKNHTSPDVDLGDISGINASVVNIQKEIDRLNEVAKNLNESLIDLQELGKYEQGSGYIPEAPRDGQAYVRKDGEWVLLSTFLGRSLEVLFQGPGSLPETGGGSDYKDDDDKGGGGSGGGGSGGGGSGGGGSGGGGSHHHHHH

SEQ ID NO: 146 - protein, 1297 aa, Artificial Sequence
  source: /note="Description of Artificial Sequence: Synthetic polypeptide"
MFVFLVLLPLVSSQCVNLTTRTQLPPAYTNSFTRGVYYPDKVFRSSVLHSTQDLFLPFFSNVTWFHAIHVSGTNGTKRFDNPVLPFNDGVYFASTEKSNIIRGWIFGTTLDSKTQSLLIVNNATNVVIKVCEFQFCNDPFLGVYYHKNNKSWMESEFRVYSSANNCTFEYVSQPFLMDLEGKQGNFKNLREFVFKNIDGYFKIYSKHTPINLVRDLPQGFSALEPLVDLPIGINITRFQTLLALHRSYLTPGDSSSGWTAGAAAYYVGYLQPRTFLLKYNENGTITDAVDCALDPLSETKCTLKSFTVEKGIYQTSNFRVQPTESIVRFPNITNLCPFGEVFNATRFASVYAWNRKRISNCVADYSVLYNSASFSTFKCYGVSPTKLNDLCFTNVYADSFVIRGDEVRQIAPGQTGKIADYNYKLPDDFTGCVIAWNSNNLDSKVGGNYNYLYRLFRKSNLKPFERDISTEIYQAGSTPCNGVEGFNCYFPLQSYGFQPTNGVGYQPYRVVVLSFELLHAPATVCGPKKSTNLVKNKCVNFNFNGLTGTGVLTESNKKFLPFQQFGRDIADITDAVRDPQTLEILDITPCSFGGVSVITPGTNTSNQVAVLYQDVNCTEVPVAIHADQLTPTWRVYSTGSNVFQTRAGCLIGAEHVNNSYECDIPIGAGICASYQTQTNSPSRAGSVASQSIIAYTMSLGAENSVAYSNNSIAIPTNFTISVTTEILPVSMTKTSVDCTMYICGDSTECSNLLLQYGSFCTQLNRALTGIAVEQDKNTQEVFAQVKQIYKTPPIKDFGGFNFSQILPDPSKPSKRSFIEDLLFNKVTLADAGFIKQYGDCLGDIAARDLICAQKFNGLTVLPPLLTDEMIAQYTSALLACTITSGWTCGAGPALQIPFAMQMAYRFNGIGVTQNVLYENQKLIANQFNSAIGKIQDSLSSTASALGKLQDVVNQNAQALNTLVKQLSSNFGAISSVLNDILSRLDPPEAEVQIDRLITGRLQSLQTYVTQQLIRAAEIRASANLAATKMSECVLGQSKRVDFCGKGYHLMSFPQSAPHGVVFLHVTYVPAQEKNFTTAPAICHDGKAHFPREGVFVSNGTHWFVTQRNFYEPQIITTDNTFVSGNCDVVIGIVNNTVYDPLQPELDSFKEELDKYFKNHTSPDVDLGDISGINASVVNIQKEIDRLNEVAKNLNESLIDLQELGKYEQGSGYIPEAPRDGQAYVRKDGEWVLLSTFLGRSLEVLFQGPGSLPETGGGSDYKDDDDKGGGGSGGGGSGGGGSGGGGSGGGGSHHHHHH

SEQ ID NO: 147 - protein, 1297 aa, Artificial Sequence
  source: /note="Description of Artificial Sequence: Synthetic polypeptide"
MFVFLVLLPLVSSQCVNLTTRTQLPPAYTNSFTRGVYYPDKVFRSSVLHSTQDLFLPFFSNVTWFHAIHVSGTNGTKRFDNPVLPFNDGVYFASTEKSNIIRGWIFGTTLDSKTQSLLIVNNATNVVIKVCEFQFCNDPFLGVYYHKNNKSWMESEFRVYSSANNCTFEYVSQPFLMDLEGKQGNFKNLREFVFKNIDGYFKIYSKHTPINLVRDLPQGFSALEPLVDLPIGINITRFQTLLALHRSYLTPGDSSSGWTAGAAAYYVGYLQPRTFLLKYNENGTITDAVDCALDPLSETKCTLKSFTVEKGIYQTSNFRVQPTESIVRFPNITNLCPFGEVFNATRFASVYAWNRKRISNCVADYSVLYNSASFSTFKCYGVSPTKLNDLCFTNVYADSFVIRGDEVRQIAPGQTGKIADYNYKLPDDFTGCVIAWNSNNLDSKVGGNYNYLYRLFRKSNLKPFERDISTEIYQAGSTPCNGVEGFNCYFPLQSYGFQPTNGVGYQPYRVVVLSFELLHAPATVCGPKKSTNLVKNKCVNFNFNGLTGTGVLTESNKKFLPFQQFGRDIADITDAVRDPQTLEILDITPCSFGGVSVITPGTNTSNQVAVLYQDVNCTEVPVAIHADQLTPTWRVYSTGSNVFQTRAGCLIGAEHVNNSYECDIPIGAGICASYQTQTNSPSRAGSVASQSIIAYTMSLGAENSVAYSNNSIAIPTNFTISVTTEILPVSMTKTSVDCTMYICGDSTECSNLLLQYGSFCTQLNRALTGIAVEQDKNTQEVFAQVKQIYKTPPIKDFGGFNFSQILPDPSKPSKRSFIEDLLFNKVTLADAGFIKQYGDCLGDIAARDLICAQKFNGLTVLPPLLTDEMIAQYTSALLAGTITCGWTFGAGPCLQIPFAMQMAYRFNGIGVTQNVLYENQKLIANQFNSAIGKIQDSLSSTASALGKLQDVVNQNAQALNTLVKQLSSNFGAISSVLNDILSRLDPPEAEVQIDRLITGRLQSLQTYVTQQLIRAAEIRASANLAATKMSECVLGQSKRVDFCGKGYHLMSFPQSAPHGVVFLHVTYVPAQEKNFTTAPAICHDGKAHFPREGVFVSNGTHWFVTQRNFYEPQIITTDNTFVSGNCDVVIGIVNNTVYDPLQPELDSFKEELDKYFKNHTSPDVDLGDISGINASVVNIQKEIDRLNEVAKNLNESLIDLQELGKYEQGSGYIPEAPRDGQAYVRKDGEWVLLSTFLGRSLEVLFQGPGSLPETGGGSDYKDDDDKGGGGSGGGGSGGGGSGGGGSGGGGSHHHHHH

SEQ ID NO: 148 - protein, 1297 aa, Artificial Sequence
  source: /note="Description of Artificial Sequence: Synthetic polypeptide"
MFVFLVLLPLVSSQCVNLTTRTQLPPAYTNSFTRGVYYPDKVFRSSVLHSTQDLFLPFFSNVTWFHAIHVSGTNGTKRFDNPVLPFNDGVYFASTEKSNIIRGWIFGTTLDSKTQSLLIVNNATNVVIKVCEFQFCNDPFLGVYYHKNNKSWMESEFRVYSSANNCTFEYVSQPFLMDLEGKQGNFKNLREFVFKNIDGYFKIYSKHTPINLVRDLPQGFSALEPLVDLPIGINITRFQTLLALHRSYLTPGDSSSGWTAGAAAYYVGYLQPRTFLLKYNENGTITDAVDCALDPLSETKCTLKSFTVEKGIYQTSNFRVQPTESIVRFPNITNLCPFGEVFNATRFASVYAWNRKRISNCVADYSVLYNSASFSTFKCYGVSPTKLNDLCFTNVYADSFVIRGDEVRQIAPGQTGKIADYNYKLPDDFTGCVIAWNSNNLDSKVGGNYNYLYRLFRKSNLKPFERDISTEIYQAGSTPCNGVEGFNCYFPLQSYGFQPTNGVGYQPYRVVVLSFELLHAPATVCGPKKSTPLVKNKCVNFNFNGLTGTGVLTESNKKFLPFQQFGRDIADTTDAVRDPQTLEILDITPCSFGGVSVITPGTNTSNQVAVLYQDVNCTEVPVAIHADQLTPTWRVYSTGSNVFQTRAGCLIGAEHVNNSYECDIPIGAGICASYQTQTNSPSRAGSVASQSIIAYTMSLGAENSVAYSNNSIAIPTNFTISVTTEILPVSMTKTSVDCTMYICGDSTECSNLLLQYGSFCTQLNRALTGIAVEQDKNTQEVFAQVKQIYKTPPIKDFGGFNFSQILPDPSKPSKRSFIEDLLFNKVTLADAGFIKQYGDCLGDIAARDLICAQKFNGLTVLPPLLTDEMIAQYTSALLACTITSGWTCGAGPALQIPFAMQMAYRFNGIGVTQNVLYENQKLIANQFNSAIGKIQDSLSSTASALGKLQDVVNQNAQALNTLVKQLSSNFGAISSVLNDILSRLDPPEAEVQIDRLITGRLQSLQTYVTQQLIRAAEIRASANLAATKMSECVLGQSKRVDFCGKGYHLMSFPQSAPHGVVFLHVTYVPAQEKNFTTAPAICHDGKAHFPREGVFVSNGTHWFVTQRNFYEPQIITTDNTFVSGNCDVVIGIVNNTVYDPLQPELDSFKEELDKYFKNHTSPDVDLGDISGINASVVNIQKEIDRLNEVAKNLNESLIDLQELGKYEQGSGYIPEAPRDGQAYVRKDGEWVLLSTFLGRSLEVLFQGPGSLPETGGGSDYKDDDDKGGGGSGGGGSGGGGSGGGGSGGGGSHHHHHH

SEQ ID NO: 149 - protein, 1297 aa, Artificial Sequence
  source: /note="Description of Artificial Sequence: Synthetic polypeptide"
MFVFLVLLPLVSSQCVNLTTRTQLPPAYTNSFTRGVYYPDKVFRSSVLHSTQDLFLPFFSNVTWFHAIHVSGTNGTKRFDNPVLPFNDGVYFASTEKSNIIRGWIFGTTLDSKTQSLLIVNNATNVVIKVCEFQFCNDPFLGVYYHKNNKSWMESEFRVYSSANNCTFEYVSQPFLMDLEGKQGNFKNLREFVFKNIDGYFKIYSKHTPINLVRDLPQGFSALEPLVDLPIGINITRFQTLLALHRSYLTPGDSSSGWTAGAAAYYVGYLQPRTFLLKYNENGTITDAVDCALDPLSETKCTLKSFTVEKGIYQTSNFRVQPTESIVRFPNITNLCPFGEVFNATRFASVYAWNRKRISNCVADYSVLYNSASFSTFKCYGVSPTKLNDLCFTNVYADSFVIRGDEVRQIAPGQTGKIADYNYKLPDDFTGCVIAWNSNNLDSKVGGNYNYLYRLFRKSNLKPFERDISTEIYQAGSTPCNGVEGFNCYFPLQSYGFQPTNGVGYQPYRVVVLSFELLHAPATVCGPKKSTPLVKNKCVNFNFNGLTGTGVLTESNKKFLPFQQFGRDIADTTDAVRDPQTLEILDITPCSFGGVSVITPGTNTSNQVAVLYQDVNCTEVPVAIHADQLTPTWRVYSTGSNVFQTRAGCLIGAEHVNNSYECDIPIGAGICASYQTQTNSPSRAGSVASQSIIAYTMSLGAENSVAYSNNSIAIPTNFTISVTTEILPVSMTKTSVDCTMYICGDSTECSNLLLQYGSFCTQLNRALTGIAVEQDKNTQEVFAQVKQIYKTPPIKDFGGFNFSQILPDPSKPSKRSFIEDLLFNKVTLADAGFIKQYGDCLGDIAARDLICAQKFNGLTVLPPLLTDEMIAQYTSALLAGTITCGWTFGAGPCLQIPFAMQMAYRFNGIGVTQNVLYENQKLIANQFNSAIGKIQDSLSSTASALGKLQDVVNQNAQALNTLVKQLSSNFGAISSVLNDILSRLDPPEAEVQIDRLITGRLQSLQTYVTQQLIRAAEIRASANLAATKMSECVLGQSKRVDFCGKGYHLMSFPQSAPHGVVFLHVTYVPAQEKNFTTAPAICHDGKAHFPREGVFVSNGTHWFVTQRNFYEPQIITTDNTFVSGNCDVVIGIVNNTVYDPLQPELDSFKEELDKYFKNHTSPDVDLGDISGINASVVNIQKEIDRLNEVAKNLNESLIDLQELGKYEQGSGYIPEAPRDGQAYVRKDGEWVLLSTFLGRSLEVLFQGPGSLPETGGGSDYKDDDDKGGGGSGGGGSGGGGSGGGGSGGGGSHHHHHH

SEQ ID NO: 150 - protein, 1297 aa, Artificial Sequence
  source: /note="Description of Artificial Sequence: Synthetic polypeptide"
MFVFLVLLPLVSSQCVNLTTRTQLPPAYTNSFTRGVYYPDKVFRSSVLHSTQDLFLPFFSNVTWFHAIHVSGTNGTKRFDNPVLPFNDGVYFASTEKSNIIRGWIFGTTLDSKTQSLLIVNNATNVVIKVCEFQFCNDPFLGVYYHKNNKSWMESEFRVYSSANNCTFEYVSQPFLMDLEGKQGNFKNLREFVFKNIDGYFKIYSKHTPINLVRDLPQGFSALEPLVDLPIGINITRFQTLLALHRSYLTPGDSSSGWTAGAAAYYVGYLQPRTFLLKYNENGTITDAVDCALDPLSETKCTLKSFTVEKGIYQTSNFRVQPTESIVRFPNITNLCPFGEVFNATRFASVYAWNRKRISNCVADYSVLYNSASFSTFKCYGVSPTKLNDLCFTNVYADSFVIRGDEVRQIAPGQTGKIADYNYKLPDDFTGCVIAWNSNNLDSKVGGNYNYLYRLFRKSNLKPFERDISTEIYQAGSTPCNGVEGFNCYFPLQSYGFQPTNGVGYQPYRVVVLSFELLHAPATVCGPKKSTPLVKNKCVNFNFNGLTGTGVLTESNKKFLPFQQFGRDIADITDAVRDPQTLEILDITPCSFGGVSVITPGTNTSNQVAVLYQNVNCTEVPVAIHADQLTPTWRVYSTGSNVFQTRAGCLIGAEHVNNSYECDIPIGAGICASYQTQTNSPSRAGSVASQSIIAYTMSLGAENSVAYSNNSIAIPTNFTISVTTEILPVSMTKTSVDCTMYICGDSTECSNLLLQYGSFCTQLNRALTGIAVEQDKNTQEVFAQVKQIYKTPPIKDFGGFNFSQILPDPSKPSKRSFIEDLLFNKVTLADAGFIKQYGDCLGDIAARDLICAQKFNGLTVLPPLLTDEMIAQYTSALLAGTITSGWTFGAGAALQIPFAMQMAYRFNGIGVTQNVLYENQKLIANQFNSAIGKIQDSLSSTASALGKLQDVVNQNAQALNTLVKQLSSNFGAISSVLNDILSRLDPPEAEVQIDRLITGRLQSLQTYVTQQLIRAAEIRASANLAATKMSECVLGQSKRVDFCGKGYHLMSFPQSAPHGVVFLHVTYVPAQEKNFTTAPAICHDGKAHFPREGVFVSNGTHWFVTQRNFYEPQIITTDNTFVSGNCDVVIGIVNNTVYDPLQPELDSFKEELDKYFKNHTSPDVDLGDISGINASVVNIQKEIDRLNEVAKNLNESLIDLQELGKYEQGSGYIPEAPRDGQAYVRKDGEWVLLSTFLGRSLEVLFQGPGSLPETGGGSDYKDDDDKGGGGSGGGGSGGGGSGGGGSGGGGSHHHHHH

SEQ ID NO: 151 - protein, 1297 aa, Artificial Sequence
  source: /note="Description of Artificial Sequence: Synthetic polypeptide"
MFVFLVLLPLVSSQCVNLTTRTQLPPAYTNSFTRGVYYPDKVFRSSVLHSTQDLFLPFFSNVTWFHAIHVSGTNGTKRFDNPVLPFNDGVYFASTEKSNIIRGWIFGTTLDSKTQSLLIVNNATNVVIKVCEFQFCNDPFLGVYYHKNNKSWMESEFRVYSSANNCTFEYVSQPFLMDLEGKQGNFKNLREFVFKNIDGYFKIYSKHTPINLVRDLPQGFSALEPLVDLPIGINITRFQTLLALHRSYLTPGDSSSGWTAGAAAYYVGYLQPRTFLLKYNENGTITDAVDCALDPLSETKCTLKSFTVEKGIYQTSNFRVQPTESIVRFPNITNLCPFGEVFNATRFASVYAWNRKRISNCVADYSVLYNSASFSTFKCYGVSPTKLNDLCFTNVYADSFVIRGDEVRQIAPGQTGKIADYNYKLPDDFTGCVIAWNSNNLDSKVGGNYNYLYRLFRKSNLKPFERDISTEIYQAGSTPCNGVEGFNCYFPLQSYGFQPTNGVGYQPYRVVVLSFELLHAPATVCGPKKSTNLVKNKCVNFNFNGLTGTGVLTESNKKFLPFQQFGRDIADITDAVRDPQTLEILDITPCSFGGVSVITPGTNTSNQVAVLYQNVNCTEVPVAIHADQLTPTWRVYSTGSNVFQTRAGCLIGAEHVNNSYECDIPIGAGICASYQTQTNSPSRAGSVASQSIIAYTMSLGAENSVAYSNNSIAIPTNFTISVTTEILPVSMTKTSVDCTMYICGDSTECSNLLLQYGSFCTQLNRALTGIAVEQDKNTQEVFAQVKQIYKTPPIKDFGGFNFSQILPDPSKPSKRSFIEDLLFNKVTLADAGFIKQYGDCLGDIAARDLICAQKFNGLTVLPPLLTDEMIAQYTSALLACTITSGWTCGAGAALQIPFAMQMAYRFNGIGVTQNVLYENQKLIANQFNSAIGKIQDSLSSTASALGKLQDVVNQNAQALNTLVKQLSSNFGAISSVLNDILSRLDPPEAEVQIDRLITGRLQSLQTYVTQQLIRAAEIRASANLAATKMSECVLGQSKRVDFCGKGYHLMSFPQSAPHGVVFLHVTYVPAQEKNFTTAPAICHDGKAHFPREGVFVSNGTHWFVTQRNFYEPQIITTDNTFVSGNCDVVIGIVNNTVYDPLQPELDSFKEELDKYFKNHTSPDVDLGDISGINASVVNIQKEIDRLNEVAKNLNESLIDLQELGKYEQGSGYIPEAPRDGQAYVRKDGEWVLLSTFLGRSLEVLFQGPGSLPETGGGSDYKDDDDKGGGGSGGGGSGGGGSGGGGSGGGGSHHHHHH

SEQ ID NO: 152 - protein, 1297 aa, Artificial Sequence
  source: /note="Description of Artificial Sequence: Synthetic polypeptide"
MFVFLVLLPLVSSQCVNLTTRTQLPPAYTNSFTRGVYYPDKVFRSSVLHSTQDLFLPFFSNVTWFHAIHVSGTNGTKRFDNPVLPFNDGVYFASTEKSNIIRGWIFGTTLDSKTQSLLIVNNATNVVIKVCEFQFCNDPFLGVYYHKNNKSWMESEFRVYSSANNCTFEYVSQPFLMDLEGKQGNFKNLREFVFKNIDGYFKIYSKHTPINLVRDLPQGFSALEPLVDLPIGINITRFQTLLALHRSYLTPGDSSSGWTAGAAAYYVGYLQPRTFLLKYNENGTITDAVDCALDPLSETKCTLKSFTVEKGIYQTSNFRVQPTESIVRFPNITNLCPFGEVFNATRFASVYAWNRKRISNCVADYSVLYNSASFSTFKCYGVSPTKLNDLCFTNVYADSFVIRGDEVRQIAPGQTGKIADYNYKLPDDFTGCVIAWNSNNLDSKVGGNYNYLYRLFRKSNLKPFERDISTEIYQAGSTPCNGVEGFNCYFPLQSYGFQPTNGVGYQPYRVVVLSFELLHAPATVCGPKKSTNLVKNKCVNFNFNGLTGTGVLTESNKKFLPFQQFGRDIADITDAVRDPQTLEILDITPCSFGGVSVITPGTNTSNQVAVLYQNVNCTEVPVAIHADQLTPTWRVYSTGSNVFQTRAGCLIGAEHVNNSYECDIPIGAGICASYQTQTNSPSRAGSVASQSIIAYTMSLGAENSVAYSNNSIAIPTNFTISVTTEILPVSMTKTSVDCTMYICGDSTECSNLLLQYGSFCTQLNRALTGIAVEQDKNTQEVFAQVKQIYKTPPIKDFGGFNFSQILPDPSKPSKRSFIEDLLFNKVTLADAGFIKQYGDCLGDIAARDLICAQKFNGLTVLPPLLTDEMIAQYTSALLAGTITCGWTFGAGACLQIPFAMQMAYRFNGIGVTQNVLYENQKLIANQFNSAIGKIQDSLSSTASALGKLQDVVNQNAQALNTLVKQLSSNFGAISSVLNDILSRLDPPEAEVQIDRLITGRLQSLQTYVTQQLIRAAEIRASANLAATKMSECVLGQSKRVDFCGKGYHLMSFPQSAPHGVVFLHVTYVPAQEKNFTTAPAICHDGKAHFPREGVFVSNGTHWFVTQRNFYEPQIITTDNTFVSGNCDVVIGIVNNTVYDPLQPELDSFKEELDKYFKNHTSPDVDLGDISGINASVVNIQKEIDRLNEVAKNLNESLIDLQELGKYEQGSGYIPEAPRDGQAYVRKDGEWVLLSTFLGRSLEVLFQGPGSLPETGGGSDYKDDDDKGGGGSGGGGSGGGGSGGGGSGGGGSHHHHHH

SEQ ID NO: 153 - protein, 1297 aa, Artificial Sequence
  source: /note="Description of Artificial Sequence: Synthetic polypeptide"
MFVFLVLLPLVSSQCVNLTTRTQLPPAYTNSFTRGVYYPDKVFRSSVLHSTQDLFLPFFSNVTWFHAIHVSGTNGTKRFDNPVLPFNDGVYFASTEKSNIIRGWIFGTTLDSKTQSLLIVNNATNVVIKVCEFQFCNDPFLGVYYHKNNKSWMESEFRVYSSANNCTFEYVSQPFLMDLEGKQGNFKNLREFVFKNIDGYFKIYSKHTPINLVRDLPQGFSALEPLVDLPIGINITRFQTLLALHRSYLTPGDSSSGWTAGAAAYYVGYLQPRTFLLKYNENGTITDAVDCALDPLSETKCTLKSFTVEKGIYQTSNFRVQPTESIVRFPNITNLCPFGEVFNATRFASVYAWNRKRISNCVADYSVLYNSASFSTFKCYGVSPTKLNDLCFTNVYADSFVIRGDEVRQIAPGQTGKIADYNYKLPDDFTGCVIAWNSNNLDSKVGGNYNYLYRLFRKSNLKPFERDISTEIYQAGSTPCNGVEGFNCYFPLQSYGFQPTNGVGYQPYRVVVLSFELLHAPATVCGPKKSTPLVKNKCVNFNFNGLTGTGVLTESNKKFLPFQQFGRDIADTTDAVRDPQTLEILDITPCSFGGVSVITPGTNTSNQVAVLYQNVNCTEVPVAIHADQLTPTWRVYSTGSNVFQTRAGCLIGAEHVNNSYECDIPIGAGICASYQTQTNSPSRAGSVASQSIIAYTMSLGAENSVAYSNNSIAIPTNFTISVTTEILPVSMTKTSVDCTMYICGDSTECSNLLLQYGSFCTQLNRALTGIAVEQDKNTQEVFAQVKQIYKTPPIKDFGGFNFSQILPDPSKPSKRSFIEDLLFNKVTLADAGFIKQYGDCLGDIAARDLICAQKFNGLTVLPPLLTDEMIAQYTSALLACTITSGWTCGAGAALQIPFAMQMAYRFNGIGVTQNVLYENQKLIANQFNSAIGKIQDSLSSTASALGKLQDVVNQNAQALNTLVKQLSSNFGAISSVLNDILSRLDPPEAEVQIDRLITGRLQSLQTYVTQQLIRAAEIRASANLAATKMSECVLGQSKRVDFCGKGYHLMSFPQSAPHGVVFLHVTYVPAQEKNFTTAPAICHDGKAHFPREGVFVSNGTHWFVTQRNFYEPQIITTDNTFVSGNCDVVIGIVNNTVYDPLQPELDSFKEELDKYFKNHTSPDVDLGDISGINASVVNIQKEIDRLNEVAKNLNESLIDLQELGKYEQGSGYIPEAPRDGQAYVRKDGEWVLLSTFLGRSLEVLFQGPGSLPETGGGSDYKDDDDKGGGGSGGGGSGGGGSGGGGSGGGGSHHHHHH

SEQ ID NO: 154 - protein, 1297 aa, Artificial Sequence
  source: /note="Description of Artificial Sequence: Synthetic polypeptide"
MFVFLVLLPLVSSQCVNLTTRTQLPPAYTNSFTRGVYYPDKVFRSSVLHSTQDLFLPFFSNVTWFHAIHVSGTNGTKRFDNPVLPFNDGVYFASTEKSNIIRGWIFGTTLDSKTQSLLIVNNATNVVIKVCEFQFCNDPFLGVYYHKNNKSWMESEFRVYSSANNCTFEYVSQPFLMDLEGKQGNFKNLREFVFKNIDGYFKIYSKHTPINLVRDLPQGFSALEPLVDLPIGINITRFQTLLALHRSYLTPGDSSSGWTAGAAAYYVGYLQPRTFLLKYNENGTITDAVDCALDPLSETKCTLKSFTVEKGIYQTSNFRVQPTESIVRFPNITNLCPFGEVFNATRFASVYAWNRKRISNCVADYSVLYNSASFSTFKCYGVSPTKLNDLCFTNVYADSFVIRGDEVRQIAPGQTGKIADYNYKLPDDFTGCVIAWNSNNLDSKVGGNYNYLYRLFRKSNLKPFERDISTEIYQAGSTPCNGVEGFNCYFPLQSYGFQPTNGVGYQPYRVVVLSFELLHAPATVCGPKKSTPLVKNKCVNFNFNGLTGTGVLTESNKKFLPFQQFGRDIADTTDAVRDPQTLEILDITPCSFGGVSVITPGTNTSNQVAVLYQNVNCTEVPVAIHADQLTPTWRVYSTGSNVFQTRAGCLIGAEHVNNSYECDIPIGAGICASYQTQTNSPSRAGSVASQSIIAYTMSLGAENSVAYSNNSIAIPTNFTISVTTEILPVSMTKTSVDCTMYICGDSTECSNLLLQYGSFCTQLNRALTGIAVEQDKNTQEVFAQVKQIYKTPPIKDFGGFNFSQILPDPSKPSKRSFIEDLLFNKVTLADAGFIKQYGDCLGDIAARDLICAQKFNGLTVLPPLLTDEMIAQYTSALLAGTITCGWTFGAGACLQIPFAMQMAYRFNGIGVTQNVLYENQKLIANQFNSAIGKIQDSLSSTASALGKLQDVVNQNAQALNTLVKQLSSNFGAISSVLNDILSRLDPPEAEVQIDRLITGRLQSLQTYVTQQLIRAAEIRASANLAATKMSECVLGQSKRVDFCGKGYHLMSFPQSAPHGVVFLHVTYVPAQEKNFTTAPAICHDGKAHFPREGVFVSNGTHWFVTQRNFYEPQIITTDNTFVSGNCDVVIGIVNNTVYDPLQPELDSFKEELDKYFKNHTSPDVDLGDISGINASVVNIQKEIDRLNEVAKNLNESLIDLQELGKYEQGSGYIPEAPRDGQAYVRKDGEWVLLSTFLGRSLEVLFQGPGSLPETGGGSDYKDDDDKGGGGSGGGGSGGGGSGGGGSGGGGSHHHHHH

SEQ ID NO: 155 - protein, 1297 aa, Artificial Sequence
  source: /note="Description of Artificial Sequence: Synthetic polypeptide"
MFVFLVLLPLVSSQCVNLTTRTQLPPAYTNSFTRGVYYPDKVFRSSVLHSTQDLFLPFFSNVTWFHAIHVSGTNGTKRFDNPVLPFNDGVYFASTEKSNIIRGWIFGTTLDSKTQSLLIVNNATNVVIKVCEFQFCNDPFLGVYYHKNNKSWMESEFRVYSSANNCTFEYVSQPFLMDLEGKQGNFKNLREFVFKNIDGYFKIYSKHTPINLVRDLPQGFSALEPLVDLPIGINITRFQTLLALHRSYLTPGDSSSGWTAGAAAYYVGYLQPRTFLLKYNENGTITDAVDCALDPLSETKCTLKSFTVEKGIYQTSNFRVQPTESIVRFPNITNLCPFGEVFNATRFASVYAWNRKRISNCVADYSVLYNSASFSTFKCYGVSPTKLNDLCFTNVYADSFVIRGDEVRQIAPGQTGKIADYNYKLPDDFTGCVIAWNSNNLDSKVGGNYNYLYRLFRKSNLKPFERDISTEIYQAGSTPCNGVEGFNCYFPLQSYGFQPTNGVGYQPYRVVVLSFELLHAPATVCGPKKSTPLVKNKCVNFNFNGLTGTGVLTESNKKFLPFQQFGRDIADITDAVRDPQTLEILDITPCSFGGVSVITPGTNTSNQVAVLYQDVNCTEVPVAIHADQLTPTWRVYSTGSNVFQTRAGCLIGAEHVNNSYECDIPIGAGICASYQTQTNSPSRAGSVASQSIIAYTMSLGAENSVAYSNNSIAIPTNFTISVTTEILPVSMTKTSVDCTMYICGDSTECSNLLLQYGSFCTQLNRALTGIAVEQDKNTQEVFAQVKQIYKTPPIKDFGGFNFSQILPDPSKPSKRSFIEDLLFNKVTLADAGFIKQYGDCLGDIAARDLICAQKFNGLTVLPPLLTDEMIAQYTSALLACTITSGWTCGAGAALQIPFAMQMAYRFNGIGVTQNVLYENQKLIANQFNSAIGKIQDSLSSTASALGKLQDVVNQNAQALNTLVKQLSSNFGAISSVLNDILSRLDPPEAEVQIDRLITGRLQSLQTYVTQQLIRAAEIRASANLAATKMSECVLGQSKRVDFCGKGYHLMSFPQSAPHGVVFLHVTYVPAQEKNFTTAPAICHDGKAHFPREGVFVSNGTHWFVTQRNFYEPQIITTDNTFVSGNCDVVIGIVNNTVYDPLQPELDSFKEELDKYFKNHTSPDVDLGDISGINASVVNIQKEIDRLNEVAKNLNESLIDLQELGKYEQGSGYIPEAPRDGQAYVRKDGEWVLLSTFLGRSLEVLFQGPGSLPETGGGSDYKDDDDKGGGGSGGGGSGGGGSGGGGSGGGGSHHHHHH

SEQ ID NO: 156 - protein, 1297 aa, Artificial Sequence
  source: /note="Description of Artificial Sequence: Synthetic polypeptide"
MFVFLVLLPLVSSQCVNLTTRTQLPPAYTNSFTRGVYYPDKVFRSSVLHSTQDLFLPFFSNVTWFHAIHVSGTNGTKRFDNPVLPFNDGVYFASTEKSNIIRGWIFGTTLDSKTQSLLIVNNATNVVIKVCEFQFCNDPFLGVYYHKNNKSWMESEFRVYSSANNCTFEYVSQPFLMDLEGKQGNFKNLREFVFKNIDGYFKIYSKHTPINLVRDLPQGFSALEPLVDLPIGINITRFQTLLALHRSYLTPGDSSSGWTAGAAAYYVGYLQPRTFLLKYNENGTITDAVDCALDPLSETKCTLKSFTVEKGIYQTSNFRVQPTESIVRFPNITNLCPFGEVFNATRFASVYAWNRKRISNCVADYSVLYNSASFSTFKCYGVSPTKLNDLCFTNVYADSFVIRGDEVRQIAPGQTGKIADYNYKLPDDFTGCVIAWNSNNLDSKVGGNYNYLYRLFRKSNLKPFERDISTEIYQAGSTPCNGVEGFNCYFPLQSYGFQPTNGVGYQPYRVVVLSFELLHAPATVCGPKKSTPLVKNKCVNFNFNGLTGTGVLTESNKKFLPFQQFGRDIADITDAVRDPQTLEILDITPCSFGGVSVITPGTNTSNQVAVLYQDVNCTEVPVAIHADQLTPTWRVYSTGSNVFQTRAGCLIGAEHVNNSYECDIPIGAGICASYQTQTNSPSRAGSVASQSIIAYTMSLGAENSVAYSNNSIAIPTNFTISVTTEILPVSMTKTSVDCTMYICGDSTECSNLLLQYGSFCTQLNRALTGIAVEQDKNTQEVFAQVKQIYKTPPIKDFGGFNFSQILPDPSKPSKRSFIEDLLFNKVTLADAGFIKQYGDCLGDIAARDLICAQKFNGLTVLPPLLTDEMIAQYTSALLAGTITCGWTFGAGACLQIPFAMQMAYRFNGIGVTQNVLYENQKLIANQFNSAIGKIQDSLSSTASALGKLQDVVNQNAQALNTLVKQLSSNFGAISSVLNDILSRLDPPEAEVQIDRLITGRLQSLQTYVTQQLIRAAEIRASANLAATKMSECVLGQSKRVDFCGKGYHLMSFPQSAPHGVVFLHVTYVPAQEKNFTTAPAICHDGKAHFPREGVFVSNGTHWFVTQRNFYEPQIITTDNTFVSGNCDVVIGIVNNTVYDPLQPELDSFKEELDKYFKNHTSPDVDLGDISGINASVVNIQKEIDRLNEVAKNLNESLIDLQELGKYEQGSGYIPEAPRDGQAYVRKDGEWVLLSTFLGRSLEVLFQGPGSLPETGGGSDYKDDDDKGGGGSGGGGSGGGGSGGGGSGGGGSHHHHHH

SEQ ID NO: 157 - protein, 1297 aa, Artificial Sequence
  source: /note="Description of Artificial Sequence: Synthetic polypeptide"
MFVFLVLLPLVSSQCVNLTTRTQLPPAYTNSFTRGVYYPDKVFRSSVLHSTQDLFLPFFSNVTWFHAIHVSGTNGTKRFDNPVLPFNDGVYFASTEKSNIIRGWIFGTTLDSKTQSLLIVNNATNVVIKVCEFQFCNDPFLGVYYHKNNKSWMESEFRVYSSANNCTFEYVSQPFLMDLEGKQGNFKNLREFVFKNIDGYFKIYSKHTPINLVRDLPQGFSALEPLVDLPIGINITRFQTLLALHRSYLTPGDSSSGWTAGAAAYYVGYLQPRTFLLKYNENGTITDAVDCALDPLSETKCTLKSFTVEKGIYQTSNFRVQPTESIVRFPNITNLCPFGEVFNATRFASVYAWNRKRISNCVADYSVLYNSASFSTFKCYGVSPTKLNDLCFTNVYADSFVIRGDEVRQIAPGQTGKIADYNYKLPDDFTGCVIAWNSNNLDSKVGGNYNYLYRLFRKSNLKPFERDISTEIYQAGSTPCNGVEGFNCYFPLQSYGFQPTNGVGYQPYRVVVLSFELLHAPATVCGPKKSTNLVKNKCVNFNFNGLTGTGVLTESNKKFLPFQQFGRDIADITDAVRDPQTLEILDITPCSFGGVSVITPGTNTSNQVAVLYQNVNCTEVPVAIHADQLTPTWRVYSTGSNVFQTRAGCLIGAEHVNNSYECDIPIGAGICASYQTQTNSPSRAGSVASQSIIAYTMSLGAENSVAYSNNSIAIPTNFTISVTTEILPVSMTKTSVDCTMYICGDSTECSNLLLQYGSFCTQLNRALTGIAVEQDKNTQEVFAQVKQIYKTPPIKDFGGFNFSQILPDPSKPSKRSFIEDLLFNKVTLADAGFIKQYGDCLGDIAARDLICAQKFNGLTVLPPLLTDEMIAQYTSALLAGTITSGWTFGAGPALQIPFAMQMAYRFNGIGVTQNVLYENQKLIANQFNSAIGKIQDSLSSTPSALGKLQDVVNQNAQALNTLVKQLSSNFGAISSVLNDILSRLDPPEAEVQIDRLITGRLQSLQTYVTQQLIRAAEIRASANLAATKMSECVLGQSKRVDFCGKGYHLMSFPQSAPHGVVFLHVTYVPAQEKNFTTAPAICHDGKAHFPREGVFVSNGTHWFVTQRNFYEPQIITTDNTFVSGNCDVVIGIVNNTVYDPLQPELDSFKEELDKYFKNHTSPDVDLGDISGINASVVNIQKEIDRLNEVAKNLNESLIDLQELGKYEQGSGYIPEAPRDGQAYVRKDGEWVLLSTFLGRSLEVLFQGPGSLPETGGGSDYKDDDDKGGGGSGGGGSGGGGSGGGGSGGGGSHHHHHH

SEQ ID NO: 158 - protein, 1297 aa, Artificial Sequence
  source: /note="Description of Artificial Sequence: Synthetic polypeptide"
MFVFLVLLPLVSSQCVNLTTRTQLPPAYTNSFTRGVYYPDKVFRSSVLHSTQDLFLPFFSNVTWFHAIHVSGTNGTKRFDNPVLPFNDGVYFASTEKSNIIRGWIFGTTLDSKTQSLLIVNNATNVVIKVCEFQFCNDPFLGVYYHKNNKSWMESEFRVYSSANNCTFEYVSQPFLMDLEGKQGNFKNLREFVFKNIDGYFKIYSKHTPINLVRDLPQGFSALEPLVDLPIGINITRFQTLLALHRSYLTPGDSSSGWTAGAAAYYVGYLQPRTFLLKYNENGTITDAVDCALDPLSETKCTLKSFTVEKGIYQTSNFRVQPTESIVRFPNITNLCPFGEVFNATRFASVYAWNRKRISNCVADYSVLYNSASFSTFKCYGVSPTKLNDLCFTNVYADSFVIRGDEVRQIAPGQTGKIADYNYKLPDDFTGCVIAWNSNNLDSKVGGNYNYLYRLFRKSNLKPFERDISTEIYQAGSTPCNGVEGFNCYFPLQSYGFQPTNGVGYQPYRVVVLSFELLHAPATVCGPKKSTPLVKNKCVNFNFNGLTGTGVLTESNKKFLPFQQFGRDIADTTDAVRDPQTLEILDITPCSFGGVSVITPGTNTSNQVAVLYQNVNCTEVPVAIHADQLTPTWRVYSTGSNVFQTRAGCLIGAEHVNNSYECDIPIGAGICASYQTQTNSPSRAGSVASQSIIAYTMSLGAENSVAYSNNSIAIPTNFTISVTTEILPVSMTKTSVDCTMYICGDSTECSNLLLQYGSFCTQLNRALTGIAVEQDKNTQEVFAQVKQIYKTPPIKDFGGFNFSQILPDPSKPSKRSFIEDLLFNKVTLADAGFIKQYGDCLGDIAARDLICAQKFNGLTVLPPLLTDEMIAQYTSALLAGTITSGWTFGAGPALQIPFAMQMAYRFNGIGVTQNVLYENQKLIANQFNSAIGKIQDSLSSTPSALGKLQDVVNQNAQALNTLVKQLSSNFGAISSVLNDILSRLDPPEAEVQIDRLITGRLQSLQTYVTQQLIRAAEIRASANLAATKMSECVLGQSKRVDFCGKGYHLMSFPQSAPHGVVFLHVTYVPAQEKNFTTAPAICHDGKAHFPREGVFVSNGTHWFVTQRNFYEPQIITTDNTFVSGNCDVVIGIVNNTVYDPLQPELDSFKEELDKYFKNHTSPDVDLGDISGINASVVNIQKEIDRLNEVAKNLNESLIDLQELGKYEQGSGYIPEAPRDGQAYVRKDGEWVLLSTFLGRSLEVLFQGPGSLPETGGGSDYKDDDDKGGGGSGGGGSGGGGSGGGGSGGGGSHHHHHH

SEQ ID NO: 159 - protein, 1297 aa, Artificial Sequence
  source: /note="Description of Artificial Sequence: Synthetic polypeptide"
MFVFLVLLPLVSSQCVNLTTRTQLPPAYTNSFTRGVYYPDKVFRSSVLHSTQDLFLPFFSNVTWFHAIHVSGTNGTKRFDNPVLPFNDGVYFASTEKSNIIRGWIFGTTLDSKTQSLLIVNNATNVVIKVCEFQFCNDPFLGVYYHKNNKSWMESEFRVYSSANNCTFEYVSQPFLMDLEGKQGNFKNLREFVFKNIDGYFKIYSKHTPINLVRDLPQGFSALEPLVDLPIGINITRFQTLLALHRSYLTPGDSSSGWTAGAAAYYVGYLQPRTFLLKYNENGTITDAVDCALDPLSETKCTLKSFTVEKGIYQTSNFRVQPTESIVRFPNITNLCPFGEVFNATRFASVYAWNRKRISNCVADYSVLYNSASFSTFKCYGVSPTKLNDLCFTNVYADSFVIRGDEVRQIAPGQTGKIADYNYKLPDDFTGCVIAWNSNNLDSKVGGNYNYLYRLFRKSNLKPFERDISTEIYQAGSTPCNGVEGFNCYFPLQSYGFQPTNGVGYQPYRVVVLSFELLHAPATVCGPKKSTNLVKNKCVNFNFNGLTGTGVLTESNKKFLPFQQFGRDIADTTDAVRDPQTLEILDITPCSFGGVSVITPGTNTSNQVAVLYQNVNCTEVPVAIHADQLTPTWRVYSTGSNVFQTRAGCLIGAEHVNNSYECDIPIGAGICASYQTQTNSPSRAGSVASQSIIAYTMSLGAENSVAYSNNSIAIPTNFTISVTTEILPVSMTKTSVDCTMYICGDSTECSNLLLQYGSFCTQLNRALTGIAVEQDKNTQEVFAQVKQIYKTPPIKDFGGFNFSQILPDPSKPSKRSFIEDLLFNKVTLADAGFIKQYGDCLGDIAARDLICAQKFNGLTVLPPLLTDEMIAQYTSALLACTITSGWTCGAGPALQIPFAMQMAYRFNGIGVTQNVLYENQKLIANQFNSAIGKIQDSLSSTPSALGKLQDVVNQNAQALNTLVKQLSSNFGAISSVLNDILSRLDPPEAEVQIDRLITGRLQSLQTYVTQQLIRAAEIRASANLAATKMSECVLGQSKRVDFCGKGYHLMSFPQSAPHGVVFLHVTYVPAQEKNFTTAPAICHDGKAHFPREGVFVSNGTHWFVTQRNFYEPQIITTDNTFVSGNCDVVIGIVNNTVYDPLQPELDSFKEELDKYFKNHTSPDVDLGDISGINASVVNIQKEIDRLNEVAKNLNESLIDLQELGKYEQGSGYIPEAPRDGQAYVRKDGEWVLLSTFLGRSLEVLFQGPGSLPETGGGSDYKDDDDKGGGGSGGGGSGGGGSGGGGSGGGGSHHHHHH

SEQ ID NO: 160 - protein, 1297 aa, Artificial Sequence
  source: /note="Description of Artificial Sequence: Synthetic polypeptide"
MFVFLVLLPLVSSQCVNLTTRTQLPPAYTNSFTRGVYYPDKVFRSSVLHSTQDLFLPFFSNVTWFHAIHVSGTNGTKRFDNPVLPFNDGVYFASTEKSNIIRGWIFGTTLDSKTQSLLIVNNATNVVIKVCEFQFCNDPFLGVYYHKNNKSWMESEFRVYSSANNCTFEYVSQPFLMDLEGKQGNFKNLREFVFKNIDGYFKIYSKHTPINLVRDLPQGFSALEPLVDLPIGINITRFQTLLALHRSYLTPGDSSSGWTAGAAAYYVGYLQPRTFLLKYNENGTITDAVDCALDPLSETKCTLKSFTVEKGIYQTSNFRVQPTESIVRFPNITNLCPFGEVFNATRFASVYAWNRKRISNCVADYSVLYNSASFSTFKCYGVSPTKLNDLCFTNVYADSFVIRGDEVRQIAPGQTGKIADYNYKLPDDFTGCVIAWNSNNLDSKVGGNYNYLYRLFRKSNLKPFERDISTEIYQAGSTPCNGVEGFNCYFPLQSYGFQPTNGVGYQPYRVVVLSFELLHAPATVCGPKKSTNLVKNKCVNFNFNGLTGTGVLTESNKKFLPFQQFGRDIADTTDAVRDPQTLEILDITPCSFGGVSVITPGTNTSNQVAVLYQNVNCTEVPVAIHADQLTPTWRVYSTGSNVFQTRAGCLIGAEHVNNSYECDIPIGAGICASYQTQTNSPSRAGSVASQSIIAYTMSLGAENSVAYSNNSIAIPTNFTISVTTEILPVSMTKTSVDCTMYICGDSTECSNLLLQYGSFCTQLNRALTGIAVEQDKNTQEVFAQVKQIYKTPPIKDFGGFNFSQILPDPSKPSKRSFIEDLLFNKVTLADAGFIKQYGDCLGDIAARDLICAQKFNGLTVLPPLLTDEMIAQYTSALLAGTITCGWTFGAGPCLQIPFAMQMAYRFNGIGVTQNVLYENQKLIANQFNSAIGKIQDSLSSTPSALGKLQDVVNQNAQALNTLVKQLSSNFGAISSVLNDILSRLDPPEAEVQIDRLITGRLQSLQTYVTQQLIRAAEIRASANLAATKMSECVLGQSKRVDFCGKGYHLMSFPQSAPHGVVFLHVTYVPAQEKNFTTAPAICHDGKAHFPREGVFVSNGTHWFVTQRNFYEPQIITTDNTFVSGNCDVVIGIVNNTVYDPLQPELDSFKEELDKYFKNHTSPDVDLGDISGINASVVNIQKEIDRLNEVAKNLNESLIDLQELGKYEQGSGYIPEAPRDGQAYVRKDGEWVLLSTFLGRSLEVLFQGPGSLPETGGGSDYKDDDDKGGGGSGGGGSGGGGSGGGGSGGGGSHHHHHH

SEQ ID NO: 161 - protein, 1297 aa, Artificial Sequence
  source: /note="Description of Artificial Sequence: Synthetic polypeptide"
MFVFLVLLPLVSSQCVNLTTRTQLPPAYTNSFTRGVYYPDKVFRSSVLHSTQDLFLPFFSNVTWFHAIHVSGTNGTKRFDNPVLPFNDGVYFASTEKSNIIRGWIFGTTLDSKTQSLLIVNNATNVVIKVCEFQFCNDPFLGVYYHKNNKSWMESEFRVYSSANNCTFEYVSQPFLMDLEGKQGNFKNLREFVFKNIDGYFKIYSKHTPINLVRDLPQGFSALEPLVDLPIGINITRFQTLLALHRSYLTPGDSSSGWTAGAAAYYVGYLQPRTFLLKYNENGTITDAVDCALDPLSETKCTLKSFTVEKGIYQTSNFRVQPTESIVRFPNITNLCPFGEVFNATRFASVYAWNRKRISNCVADYSVLYNSASFSTFKCYGVSPTKLNDLCFTNVYADSFVIRGDEVRQIAPGQTGKIADYNYKLPDDFTGCVIAWNSNNLDSKVGGNYNYLYRLFRKSNLKPFERDISTEIYQAGSTPCNGVEGFNCYFPLQSYGFQPTNGVGYQPYRVVVLSFELLHAPATVCGPKKSTPLVKNKCVNFNFNGLTGTGVLTESNKKFLPFQQFGRDIADITDAVRDPQTLEILDITPCSFGGVSVITPGTNTSNQVAVLYQDVNCTEVPVAIHADQLTPTWRVYSTGSNVFQTRAGCLIGAEHVNNSYECDIPIGAGICASYQTQTNSPSRAGSVASQSIIAYTMSLGAENSVAYSNNSIAIPTNFTISVTTEILPVSMTKTSVDCTMYICGDSTECSNLLLQYGSFCTQLNRALTGIAVEQDKNTQEVFAQVKQIYKTPPIKDFGGFNFSQILPDPSKPSKRSFIEDLLFNKVTLADAGFIKQYGDCLGDIAARDLICAQKFNGLTVLPPLLTDEMIAQYTSALLAGTITSGWTFGAGPALQIPFAMQMAYRFNGIGVTQNVLYENQKLIANQFNSAIGKIQDSLSSTPSALGKLQDVVNQNAQALNTLVKQLSSNFGAISSVLNDILSRLDPPEAEVQIDRLITGRLQSLQTYVTQQLIRAAEIRASANLAATKMSECVLGQSKRVDFCGKGYHLMSFPQSAPHGVVFLHVTYVPAQEKNFTTAPAICHDGKAHFPREGVFVSNGTHWFVTQRNFYEPQIITTDNTFVSGNCDVVIGIVNNTVYDPLQPELDSFKEELDKYFKNHTSPDVDLGDISGINASVVNIQKEIDRLNEVAKNLNESLIDLQELGKYEQGSGYIPEAPRDGQAYVRKDGEWVLLSTFLGRSLEVLFQGPGSLPETGGGSDYKDDDDKGGGGSGGGGSGGGGSGGGGSGGGGSHHHHHH

SEQ ID NO: 162 - protein, 1297 aa, Artificial Sequence
  source: /note="Description of Artificial Sequence: Synthetic polypeptide"
MFVFLVLLPLVSSQCVNLTTRTQLPPAYTNSFTRGVYYPDKVFRSSVLHSTQDLFLPFFSNVTWFHAIHVSGTNGTKRFDNPVLPFNDGVYFASTEKSNIIRGWIFGTTLDSKTQSLLIVNNATNVVIKVCEFQFCNDPFLGVYYHKNNKSWMESEFRVYSSANNCTFEYVSQPFLMDLEGKQGNFKNLREFVFKNIDGYFKIYSKHTPINLVRDLPQGFSALEPLVDLPIGINITRFQTLLALHRSYLTPGDSSSGWTAGAAAYYVGYLQPRTFLLKYNENGTITDAVDCALDPLSETKCTLKSFTVEKGIYQTSNFRVQPTESIVRFPNITNLCPFGEVFNATRFASVYAWNRKRISNCVADYSVLYNSASFSTFKCYGVSPTKLNDLCFTNVYADSFVIRGDEVRQIAPGQTGKIADYNYKLPDDFTGCVIAWNSNNLDSKVGGNYNYLYRLFRKSNLKPFERDISTEIYQAGSTPCNGVEGFNCYFPLQSYGFQPTNGVGYQPYRVVVLSFELLHAPATVCGPKKSTNLVKNKCVNFNFNGLTGTGVLTESNKKFLPFQQFGRDIADITDAVRDPQTLEILDITPCSFGGVSVITPGTNTSNQVAVLYQDVNCTEVPVAIHADQLTPTWRVYSTGSNVFQTRAGCLIGAEHVNNSYECDIPIGAGICASYQTQTNSPSRAGSVASQSIIAYTMSLGAENSVAYSNNSIAIPTNFTISVTTEILPVSMTKTSVDCTMYICGDSTECSNLLLQYGSFCTQLNRALTGIAVEQDKNTQEVFAQVKQIYKTPPIKDFGGFNFSQILPDPSKPSKRSFIEDLLFNKVTLADAGFIKQYGDCLGDIAARDLICAQKFNGLTVLPPLLTDEMIAQYTSALLACTITSGWTCGAGPALQIPFAMQMAYRFNGIGVTQNVLYENQKLIANQFNSAIGKIQDSLSSTPSALGKLQDVVNQNAQALNTLVKQLSSNFGAISSVLNDILSRLDPPEAEVQIDRLITGRLQSLQTYVTQQLIRAAEIRASANLAATKMSECVLGQSKRVDFCGKGYHLMSFPQSAPHGVVFLHVTYVPAQEKNFTTAPAICHDGKAHFPREGVFVSNGTHWFVTQRNFYEPQIITTDNTFVSGNCDVVIGIVNNTVYDPLQPELDSFKEELDKYFKNHTSPDVDLGDISGINASVVNIQKEIDRLNEVAKNLNESLIDLQELGKYEQGSGYIPEAPRDGQAYVRKDGEWVLLSTFLGRSLEVLFQGPGSLPETGGGSDYKDDDDKGGGGSGGGGSGGGGSGGGGSGGGGSHHHHHH

SEQ ID NO: 163 - protein, 1297 aa, Artificial Sequence
  source: /note="Description of Artificial Sequence: Synthetic polypeptide"
MFVFLVLLPLVSSQCVNLTTRTQLPPAYTNSFTRGVYYPDKVFRSSVLHSTQDLFLPFFSNVTWFHAIHVSGTNGTKRFDNPVLPFNDGVYFASTEKSNIIRGWIFGTTLDSKTQSLLIVNNATNVVIKVCEFQFCNDPFLGVYYHKNNKSWMESEFRVYSSANNCTFEYVSQPFLMDLEGKQGNFKNLREFVFKNIDGYFKIYSKHTPINLVRDLPQGFSALEPLVDLPIGINITRFQTLLALHRSYLTPGDSSSGWTAGAAAYYVGYLQPRTFLLKYNENGTITDAVDCALDPLSETKCTLKSFTVEKGIYQTSNFRVQPTESIVRFPNITNLCPFGEVFNATRFASVYAWNRKRISNCVADYSVLYNSASFSTFKCYGVSPTKLNDLCFTNVYADSFVIRGDEVRQIAPGQTGKIADYNYKLPDDFTGCVIAWNSNNLDSKVGGNYNYLYRLFRKSNLKPFERDISTEIYQAGSTPCNGVEGFNCYFPLQSYGFQPTNGVGYQPYRVVVLSFELLHAPATVCGPKKSTNLVKNKCVNFNFNGLTGTGVLTESNKKFLPFQQFGRDIADITDAVRDPQTLEILDITPCSFGGVSVITPGTNTSNQVAVLYQDVNCTEVPVAIHADQLTPTWRVYSTGSNVFQTRAGCLIGAEHVNNSYECDIPIGAGICASYQTQTNSPSRAGSVASQSIIAYTMSLGAENSVAYSNNSIAIPTNFTISVTTEILPVSMTKTSVDCTMYICGDSTECSNLLLQYGSFCTQLNRALTGIAVEQDKNTQEVFAQVKQIYKTPPIKDFGGFNFSQILPDPSKPSKRSFIEDLLFNKVTLADAGFIKQYGDCLGDIAARDLICAQKFNGLTVLPPLLTDEMIAQYTSALLAGTITCGWTFGAGPCLQIPFAMQMAYRFNGIGVTQNVLYENQKLIANQFNSAIGKIQDSLSSTPSALGKLQDVVNQNAQALNTLVKQLSSNFGAISSVLNDILSRLDPPEAEVQIDRLITGRLQSLQTYVTQQLIRAAEIRASANLAATKMSECVLGQSKRVDFCGKGYHLMSFPQSAPHGVVFLHVTYVPAQEKNFTTAPAICHDGKAHFPREGVFVSNGTHWFVTQRNFYEPQIITTDNTFVSGNCDVVIGIVNNTVYDPLQPELDSFKEELDKYFKNHTSPDVDLGDISGINASVVNIQKEIDRLNEVAKNLNESLIDLQELGKYEQGSGYIPEAPRDGQAYVRKDGEWVLLSTFLGRSLEVLFQGPGSLPETGGGSDYKDDDDKGGGGSGGGGSGGGGSGGGGSGGGGSHHHHHH

SEQ ID NO: 164 - protein, 1297 aa, Artificial Sequence
  source: /note="Description of Artificial Sequence: Synthetic polypeptide"
MFVFLVLLPLVSSQCVNLTTRTQLPPAYTNSFTRGVYYPDKVFRSSVLHSTQDLFLPFFSNVTWFHAIHVSGTNGTKRFDNPVLPFNDGVYFASTEKSNIIRGWIFGTTLDSKTQSLLIVNNATNVVIKVCEFQFCNDPFLGVYYHKNNKSWMESEFRVYSSANNCTFEYVSQPFLMDLEGKQGNFKNLREFVFKNIDGYFKIYSKHTPINLVRDLPQGFSALEPLVDLPIGINITRFQTLLALHRSYLTPGDSSSGWTAGAAAYYVGYLQPRTFLLKYNENGTITDAVDCALDPLSETKCTLKSFTVEKGIYQTSNFRVQPTESIVRFPNITNLCPFGEVFNATRFASVYAWNRKRISNCVADYSVLYNSASFSTFKCYGVSPTKLNDLCFTNVYADSFVIRGDEVRQIAPGQTGKIADYNYKLPDDFTGCVIAWNSNNLDSKVGGNYNYLYRLFRKSNLKPFERDISTEIYQAGSTPCNGVEGFNCYFPLQSYGFQPTNGVGYQPYRVVVLSFELLHAPATVCGPKKSTPLVKNKCVNFNFNGLTGTGVLTESNKKFLPFQQFGRDIADTTDAVRDPQTLEILDITPCSFGGVSVITPGTNTSNQVAVLYQDVNCTEVPVAIHADQLTPTWRVYSTGSNVFQTRAGCLIGAEHVNNSYECDIPIGAGICASYQTQTNSPSRAGSVASQSIIAYTMSLGAENSVAYSNNSIAIPTNFTISVTTEILPVSMTKTSVDCTMYICGDSTECSNLLLQYGSFCTQLNRALTGIAVEQDKNTQEVFAQVKQIYKTPPIKDFGGFNFSQILPDPSKPSKRSFIEDLLFNKVTLADAGFIKQYGDCLGDIAARDLICAQKFNGLTVLPPLLTDEMIAQYTSALLACTITSGWTCGAGPALQIPFAMQMAYRFNGIGVTQNVLYENQKLIANQFNSAIGKIQDSLSSTPSALGKLQDVVNQNAQALNTLVKQLSSNFGAISSVLNDILSRLDPPEAEVQIDRLITGRLQSLQTYVTQQLIRAAEIRASANLAATKMSECVLGQSKRVDFCGKGYHLMSFPQSAPHGVVFLHVTYVPAQEKNFTTAPAICHDGKAHFPREGVFVSNGTHWFVTQRNFYEPQIITTDNTFVSGNCDVVIGIVNNTVYDPLQPELDSFKEELDKYFKNHTSPDVDLGDISGINASVVNIQKEIDRLNEVAKNLNESLIDLQELGKYEQGSGYIPEAPRDGQAYVRKDGEWVLLSTFLGRSLEVLFQGPGSLPETGGGSDYKDDDDKGGGGSGGGGSGGGGSGGGGSGGGGSHHHHHH

SEQ ID NO: 165 - protein, 1297 aa, Artificial Sequence
  source: /note="Description of Artificial Sequence: Synthetic polypeptide"
MFVFLVLLPLVSSQCVNLTTRTQLPPAYTNSFTRGVYYPDKVFRSSVLHSTQDLFLPFFSNVTWFHAIHVSGTNGTKRFDNPVLPFNDGVYFASTEKSNIIRGWIFGTTLDSKTQSLLIVNNATNVVIKVCEFQFCNDPFLGVYYHKNNKSWMESEFRVYSSANNCTFEYVSQPFLMDLEGKQGNFKNLREFVFKNIDGYFKIYSKHTPINLVRDLPQGFSALEPLVDLPIGINITRFQTLLALHRSYLTPGDSSSGWTAGAAAYYVGYLQPRTFLLKYNENGTITDAVDCALDPLSETKCTLKSFTVEKGIYQTSNFRVQPTESIVRFPNITNLCPFGEVFNATRFASVYAWNRKRISNCVADYSVLYNSASFSTFKCYGVSPTKLNDLCFTNVYADSFVIRGDEVRQIAPGQTGKIADYNYKLPDDFTGCVIAWNSNNLDSKVGGNYNYLYRLFRKSNLKPFERDISTEIYQAGSTPCNGVEGFNCYFPLQSYGFQPTNGVGYQPYRVVVLSFELLHAPATVCGPKKSTPLVKNKCVNFNFNGLTGTGVLTESNKKFLPFQQFGRDIADTTDAVRDPQTLEILDITPCSFGGVSVITPGTNTSNQVAVLYQDVNCTEVPVAIHADQLTPTWRVYSTGSNVFQTRAGCLIGAEHVNNSYECDIPIGAGICASYQTQTNSPSRAGSVASQSIIAYTMSLGAENSVAYSNNSIAIPTNFTISVTTEILPVSMTKTSVDCTMYICGDSTECSNLLLQYGSFCTQLNRALTGIAVEQDKNTQEVFAQVKQIYKTPPIKDFGGFNFSQILPDPSKPSKRSFIEDLLFNKVTLADAGFIKQYGDCLGDIAARDLICAQKFNGLTVLPPLLTDEMIAQYTSALLAGTITCGWTFGAGPCLQIPFAMQMAYRFNGIGVTQNVLYENQKLIANQFNSAIGKIQDSLSSTPSALGKLQDVVNQNAQALNTLVKQLSSNFGAISSVLNDILSRLDPPEAEVQIDRLITGRLQSLQTYVTQQLIRAAEIRASANLAATKMSECVLGQSKRVDFCGKGYHLMSFPQSAPHGVVFLHVTYVPAQEKNFTTAPAICHDGKAHFPREGVFVSNGTHWFVTQRNFYEPQIITTDNTFVSGNCDVVIGIVNNTVYDPLQPELDSFKEELDKYFKNHTSPDVDLGDISGINASVVNIQKEIDRLNEVAKNLNESLIDLQELGKYEQGSGYIPEAPRDGQAYVRKDGEWVLLSTFLGRSLEVLFQGPGSLPETGGGSDYKDDDDKGGGGSGGGGSGGGGSGGGGSGGGGSHHHHHH

SEQ ID NO: 166 - protein, 1297 aa, Artificial Sequence
  source: /note="Description of Artificial Sequence: Synthetic polypeptide"
MFVFLVLLPLVSSQCVNLTTRTQLPPAYTNSFTRGVYYPDKVFRSSVLHSTQDLFLPFFSNVTWFHAIHVSGTNGTKRFDNPVLPFNDGVYFASTEKSNIIRGWIFGTTLDSKTQSLLIVNNATNVVIKVCEFQFCNDPFLGVYYHKNNKSWMESEFRVYSSANNCTFEYVSQPFLMDLEGKQGNFKNLREFVFKNIDGYFKIYSKHTPINLVRDLPQGFSALEPLVDLPIGINITRFQTLLALHRSYLTPGDSSSGWTAGAAAYYVGYLQPRTFLLKYNENGTITDAVDCALDPLSETKCTLKSFTVEKGIYQTSNFRVQPTESIVRFPNITNLCPFGEVFNATRFASVYAWNRKRISNCVADYSVLYNSASFSTFKCYGVSPTKLNDLCFTNVYADSFVIRGDEVRQIAPGQTGKIADYNYKLPDDFTGCVIAWNSNNLDSKVGGNYNYLYRLFRKSNLKPFERDISTEIYQAGSTPCNGVEGFNCYFPLQSYGFQPTNGVGYQPYRVVVLSFELLHAPATVCGPKKSTPLVKNKCVNFNFNGLTGTGVLTESNKKFLPFQQFGRDIADITDAVRDPQTLEILDITPCSFGGVSVITPGTNTSNQVAVLYQNVNCTEVPVAIHADQLTPTWRVYSTGSNVFQTRAGCLIGAEHVNNSYECDIPIGAGICASYQTQTNSPSRAGSVASQSIIAYTMSLGAENSVAYSNNSIAIPTNFTISVTTEILPVSMTKTSVDCTMYICGDSTECSNLLLQYGSFCTQLNRALTGIAVEQDKNTQEVFAQVKQIYKTPPIKDFGGFNFSQILPDPSKPSKRSFIEDLLFNKVTLADAGFIKQYGDCLGDIAARDLICAQKFNGLTVLPPLLTDEMIAQYTSALLAGTITSGWTFGAGAALQIPFAMQMAYRFNGIGVTQNVLYENQKLIANQFNSAIGKIQDSLSSTPSALGKLQDVVNQNAQALNTLVKQLSSNFGAISSVLNDILSRLDPPEAEVQIDRLITGRLQSLQTYVTQQLIRAAEIRASANLAATKMSECVLGQSKRVDFCGKGYHLMSFPQSAPHGVVFLHVTYVPAQEKNFTTAPAICHDGKAHFPREGVFVSNGTHWFVTQRNFYEPQIITTDNTFVSGNCDVVIGIVNNTVYDPLQPELDSFKEELDKYFKNHTSPDVDLGDISGINASVVNIQKEIDRLNEVAKNLNESLIDLQELGKYEQGSGYIPEAPRDGQAYVRKDGEWVLLSTFLGRSLEVLFQGPGSLPETGGGSDYKDDDDKGGGGSGGGGSGGGGSGGGGSGGGGSHHHHHH

SEQ ID NO: 167 - protein, 1297 aa, Artificial Sequence
  source: /note="Description of Artificial Sequence: Synthetic polypeptide"
MFVFLVLLPLVSSQCVNLTTRTQLPPAYTNSFTRGVYYPDKVFRSSVLHSTQDLFLPFFSNVTWFHAIHVSGTNGTKRFDNPVLPFNDGVYFASTEKSNIIRGWIFGTTLDSKTQSLLIVNNATNVVIKVCEFQFCNDPFLGVYYHKNNKSWMESEFRVYSSANNCTFEYVSQPFLMDLEGKQGNFKNLREFVFKNIDGYFKIYSKHTPINLVRDLPQGFSALEPLVDLPIGINITRFQTLLALHRSYLTPGDSSSGWTAGAAAYYVGYLQPRTFLLKYNENGTITDAVDCALDPLSETKCTLKSFTVEKGIYQTSNFRVQPTESIVRFPNITNLCPFGEVFNATRFASVYAWNRKRISNCVADYSVLYNSASFSTFKCYGVSPTKLNDLCFTNVYADSFVIRGDEVRQIAPGQTGKIADYNYKLPDDFTGCVIAWNSNNLDSKVGGNYNYLYRLFRKSNLKPFERDISTEIYQAGSTPCNGVEGFNCYFPLQSYGFQPTNGVGYQPYRVVVLSFELLHAPATVCGPKKSTNLVKNKCVNFNFNGLTGTGVLTESNKKFLPFQQFGRDIADITDAVRDPQTLEILDITPCSFGGVSVITPGTNTSNQVAVLYQNVNCTEVPVAIHADQLTPTWRVYSTGSNVFQTRAGCLIGAEHVNNSYECDIPIGAGICASYQTQTNSPSRAGSVASQSIIAYTMSLGAENSVAYSNNSIAIPTNFTISVTTEILPVSMTKTSVDCTMYICGDSTECSNLLLQYGSFCTQLNRALTGIAVEQDKNTQEVFAQVKQIYKTPPIKDFGGFNFSQILPDPSKPSKRSFIEDLLFNKVTLADAGFIKQYGDCLGDIAARDLICAQKFNGLTVLPPLLTDEMIAQYTSALLACTITSGWTCGAGAALQIPFAMQMAYRFNGIGVTQNVLYENQKLIANQFNSAIGKIQDSLSSTPSALGKLQDVVNQNAQALNTLVKQLSSNFGAISSVLNDILSRLDPPEAEVQIDRLITGRLQSLQTYVTQQLIRAAEIRASANLAATKMSECVLGQSKRVDFCGKGYHLMSFPQSAPHGVVFLHVTYVPAQEKNFTTAPAICHDGKAHFPREGVFVSNGTHWFVTQRNFYEPQIITTDNTFVSGNCDVVIGIVNNTVYDPLQPELDSFKEELDKYFKNHTSPDVDLGDISGINASVVNIQKEIDRLNEVAKNLNESLIDLQELGKYEQGSGYIPEAPRDGQAYVRKDGEWVLLSTFLGRSLEVLFQGPGSLPETGGGSDYKDDDDKGGGGSGGGGSGGGGSGGGGSGGGGSHHHHHH

SEQ ID NO: 168 - protein, 1297 aa, Artificial Sequence
  source: /note="Description of Artificial Sequence: Synthetic polypeptide"
MFVFLVLLPLVSSQCVNLTTRTQLPPAYTNSFTRGVYYPDKVFRSSVLHSTQDLFLPFFSNVTWFHAIHVSGTNGTKRFDNPVLPFNDGVYFASTEKSNIIRGWIFGTTLDSKTQSLLIVNNATNVVIKVCEFQFCNDPFLGVYYHKNNKSWMESEFRVYSSANNCTFEYVSQPFLMDLEGKQGNFKNLREFVFKNIDGYFKIYSKHTPINLVRDLPQGFSALEPLVDLPIGINITRFQTLLALHRSYLTPGDSSSGWTAGAAAYYVGYLQPRTFLLKYNENGTITDAVDCALDPLSETKCTLKSFTVEKGIYQTSNFRVQPTESIVRFPNITNLCPFGEVFNATRFASVYAWNRKRISNCVADYSVLYNSASFSTFKCYGVSPTKLNDLCFTNVYADSFVIRGDEVRQIAPGQTGKIADYNYKLPDDFTGCVIAWNSNNLDSKVGGNYNYLYRLFRKSNLKPFERDISTEIYQAGSTPCNGVEGFNCYFPLQSYGFQPTNGVGYQPYRVVVLSFELLHAPATVCGPKKSTNLVKNKCVNFNFNGLTGTGVLTESNKKFLPFQQFGRDIADITDAVRDPQTLEILDITPCSFGGVSVITPGTNTSNQVAVLYQNVNCTEVPVAIHADQLTPTWRVYSTGSNVFQTRAGCLIGAEHVNNSYECDIPIGAGICASYQTQTNSPSRAGSVASQSIIAYTMSLGAENSVAYSNNSIAIPTNFTISVTTEILPVSMTKTSVDCTMYICGDSTECSNLLLQYGSFCTQLNRALTGIAVEQDKNTQEVFAQVKQIYKTPPIKDFGGFNFSQILPDPSKPSKRSFIEDLLFNKVTLADAGFIKQYGDCLGDIAARDLICAQKFNGLTVLPPLLTDEMIAQYTSALLAGTITCGWTFGAGACLQIPFAMQMAYRFNGIGVTQNVLYENQKLIANQFNSAIGKIQDSLSSTPSALGKLQDVVNQNAQALNTLVKQLSSNFGAISSVLNDILSRLDPPEAEVQIDRLITGRLQSLQTYVTQQLIRAAEIRASANLAATKMSECVLGQSKRVDFCGKGYHLMSFPQSAPHGVVFLHVTYVPAQEKNFTTAPAICHDGKAHFPREGVFVSNGTHWFVTQRNFYEPQIITTDNTFVSGNCDVVIGIVNNTVYDPLQPELDSFKEELDKYFKNHTSPDVDLGDISGINASVVNIQKEIDRLNEVAKNLNESLIDLQELGKYEQGSGYIPEAPRDGQAYVRKDGEWVLLSTFLGRSLEVLFQGPGSLPETGGGSDYKDDDDKGGGGSGGGGSGGGGSGGGGSGGGGSHHHHHH

SEQ ID NO: 169 - protein, 1297 aa, Artificial Sequence
  source: /note="Description of Artificial Sequence: Synthetic polypeptide"
MFVFLVLLPLVSSQCVNLTTRTQLPPAYTNSFTRGVYYPDKVFRSSVLHSTQDLFLPFFSNVTWFHAIHVSGTNGTKRFDNPVLPFNDGVYFASTEKSNIIRGWIFGTTLDSKTQSLLIVNNATNVVIKVCEFQFCNDPFLGVYYHKNNKSWMESEFRVYSSANNCTFEYVSQPFLMDLEGKQGNFKNLREFVFKNIDGYFKIYSKHTPINLVRDLPQGFSALEPLVDLPIGINITRFQTLLALHRSYLTPGDSSSGWTAGAAAYYVGYLQPRTFLLKYNENGTITDAVDCALDPLSETKCTLKSFTVEKGIYQTSNFRVQPTESIVRFPNITNLCPFGEVFNATRFASVYAWNRKRISNCVADYSVLYNSASFSTFKCYGVSPTKLNDLCFTNVYADSFVIRGDEVRQIAPGQTGKIADYNYKLPDDFTGCVIAWNSNNLDSKVGGNYNYLYRLFRKSNLKPFERDISTEIYQAGSTPCNGVEGFNCYFPLQSYGFQPTNGVGYQPYRVVVLSFELLHAPATVCGPKKSTPLVKNKCVNFNFNGLTGTGVLTESNKKFLPFQQFGRDIADTTDAVRDPQTLEILDITPCSFGGVSVITPGTNTSNQVAVLYQNVNCTEVPVAIHADQLTPTWRVYSTGSNVFQTRAGCLIGAEHVNNSYECDIPIGAGICASYQTQTNSPSRAGSVASQSIIAYTMSLGAENSVAYSNNSIAIPTNFTISVTTEILPVSMTKTSVDCTMYICGDSTECSNLLLQYGSFCTQLNRALTGIAVEQDKNTQEVFAQVKQIYKTPPIKDFGGFNFSQILPDPSKPSKRSFIEDLLFNKVTLADAGFIKQYGDCLGDIAARDLICAQKFNGLTVLPPLLTDEMIAQYTSALLACTITSGWTCGAGAALQIPFAMQMAYRFNGIGVTQNVLYENQKLIANQFNSAIGKIQDSLSSTPSALGKLQDVVNQNAQALNTLVKQLSSNFGAISSVLNDILSRLDPPEAEVQIDRLITGRLQSLQTYVTQQLIRAAEIRASANLAATKMSECVLGQSKRVDFCGKGYHLMSFPQSAPHGVVFLHVTYVPAQEKNFTTAPAICHDGKAHFPREGVFVSNGTHWFVTQRNFYEPQIITTDNTFVSGNCDVVIGIVNNTVYDPLQPELDSFKEELDKYFKNHTSPDVDLGDISGINASVVNIQKEIDRLNEVAKNLNESLIDLQELGKYEQGSGYIPEAPRDGQAYVRKDGEWVLLSTFLGRSLEVLFQGPGSLPETGGGSDYKDDDDKGGGGSGGGGSGGGGSGGGGSGGGGSHHHHHH

SEQ ID NO: 170 - protein, 1297 aa, Artificial Sequence
  source: /note="Description of Artificial Sequence: Synthetic polypeptide"
MFVFLVLLPLVSSQCVNLTTRTQLPPAYTNSFTRGVYYPDKVFRSSVLHSTQDLFLPFFSNVTWFHAIHVSGTNGTKRFDNPVLPFNDGVYFASTEKSNIIRGWIFGTTLDSKTQSLLIVNNATNVVIKVCEFQFCNDPFLGVYYHKNNKSWMESEFRVYSSANNCTFEYVSQPFLMDLEGKQGNFKNLREFVFKNIDGYFKIYSKHTPINLVRDLPQGFSALEPLVDLPIGINITRFQTLLALHRSYLTPGDSSSGWTAGAAAYYVGYLQPRTFLLKYNENGTITDAVDCALDPLSETKCTLKSFTVEKGIYQTSNFRVQPTESIVRFPNITNLCPFGEVFNATRFASVYAWNRKRISNCVADYSVLYNSASFSTFKCYGVSPTKLNDLCFTNVYADSFVIRGDEVRQIAPGQTGKIADYNYKLPDDFTGCVIAWNSNNLDSKVGGNYNYLYRLFRKSNLKPFERDISTEIYQAGSTPCNGVEGFNCYFPLQSYGFQPTNGVGYQPYRVVVLSFELLHAPATVCGPKKSTPLVKNKCVNFNFNGLTGTGVLTESNKKFLPFQQFGRDIADTTDAVRDPQTLEILDITPCSFGGVSVITPGTNTSNQVAVLYQNVNCTEVPVAIHADQLTPTWRVYSTGSNVFQTRAGCLIGAEHVNNSYECDIPIGAGICASYQTQTNSPSRAGSVASQSIIAYTMSLGAENSVAYSNNSIAIPTNFTISVTTEILPVSMTKTSVDCTMYICGDSTECSNLLLQYGSFCTQLNRALTGIAVEQDKNTQEVFAQVKQIYKTPPIKDFGGFNFSQILPDPSKPSKRSFIEDLLFNKVTLADAGFIKQYGDCLGDIAARDLICAQKFNGLTVLPPLLTDEMIAQYTSALLAGTITCGWTFGAGACLQIPFAMQMAYRFNGIGVTQNVLYENQKLIANQFNSAIGKIQDSLSSTPSALGKLQDVVNQNAQALNTLVKQLSSNFGAISSVLNDILSRLDPPEAEVQIDRLITGRLQSLQTYVTQQLIRAAEIRASANLAATKMSECVLGQSKRVDFCGKGYHLMSFPQSAPHGVVFLHVTYVPAQEKNFTTAPAICHDGKAHFPREGVFVSNGTHWFVTQRNFYEPQIITTDNTFVSGNCDVVIGIVNNTVYDPLQPELDSFKEELDKYFKNHTSPDVDLGDISGINASVVNIQKEIDRLNEVAKNLNESLIDLQELGKYEQGSGYIPEAPRDGQAYVRKDGEWVLLSTFLGRSLEVLFQGPGSLPETGGGSDYKDDDDKGGGGSGGGGSGGGGSGGGGSGGGGSHHHHHH

SEQ ID NO: 171 - protein, 1297 aa, Artificial Sequence
  source: /note="Description of Artificial Sequence: Synthetic polypeptide"
MFVFLVLLPLVSSQCVNLTTRTQLPPAYTNSFTRGVYYPDKVFRSSVLHSTQDLFLPFFSNVTWFHAIHVSGTNGTKRFDNPVLPFNDGVYFASTEKSNIIRGWIFGTTLDSKTQSLLIVNNATNVVIKVCEFQFCNDPFLGVYYHKNNKSWMESEFRVYSSANNCTFEYVSQPFLMDLEGKQGNFKNLREFVFKNIDGYFKIYSKHTPINLVRDLPQGFSALEPLVDLPIGINITRFQTLLALHRSYLTPGDSSSGWTAGAAAYYVGYLQPRTFLLKYNENGTITDAVDCALDPLSETKCTLKSFTVEKGIYQTSNFRVQPTESIVRFPNITNLCPFGEVFNATRFASVYAWNRKRISNCVADYSVLYNSASFSTFKCYGVSPTKLNDLCFTNVYADSFVIRGDEVRQIAPGQTGKIADYNYKLPDDFTGCVIAWNSNNLDSKVGGNYNYLYRLFRKSNLKPFERDISTEIYQAGSTPCNGVEGFNCYFPLQSYGFQPTNGVGYQPYRVVVLSFELLHAPATVCGPKKSTPLVKNKCVNFNFNGLTGTGVLTESNKKFLPFQQFGRDIADITDAVRDPQTLEILDITPCSFGGVSVITPGTNTSNQVAVLYQDVNCTEVPVAIHADQLTPTWRVYSTGSNVFQTRAGCLIGAEHVNNSYECDIPIGAGICASYQTQTNSPSRAGSVASQSIIAYTMSLGAENSVAYSNNSIAIPTNFTISVTTEILPVSMTKTSVDCTMYICGDSTECSNLLLQYGSFCTQLNRALTGIAVEQDKNTQEVFAQVKQIYKTPPIKDFGGFNFSQILPDPSKPSKRSFIEDLLFNKVTLADAGFIKQYGDCLGDIAARDLICAQKFNGLTVLPPLLTDEMIAQYTSALLACTITSGWTCGAGAALQIPFAMQMAYRFNGIGVTQNVLYENQKLIANQFNSAIGKIQDSLSSTPSALGKLQDVVNQNAQALNTLVKQLSSNFGAISSVLNDILSRLDPPEAEVQIDRLITGRLQSLQTYVTQQLIRAAEIRASANLAATKMSECVLGQSKRVDFCGKGYHLMSFPQSAPHGVVFLHVTYVPAQEKNFTTAPAICHDGKAHFPREGVFVSNGTHWFVTQRNFYEPQIITTDNTFVSGNCDVVIGIVNNTVYDPLQPELDSFKEELDKYFKNHTSPDVDLGDISGINASVVNIQKEIDRLNEVAKNLNESLIDLQELGKYEQGSGYIPEAPRDGQAYVRKDGEWVLLSTFLGRSLEVLFQGPGSLPETGGGSDYKDDDDKGGGGSGGGGSGGGGSGGGGSGGGGSHHHHHH

SEQ ID NO: 172 - protein, 1297 aa, Artificial Sequence
  source: /note="Description of Artificial Sequence: Synthetic polypeptide"
MFVFLVLLPLVSSQCVNLTTRTQLPPAYTNSFTRGVYYPDKVFRSSVLHSTQDLFLPFFSNVTWFHAIHVSGTNGTKRFDNPVLPFNDGVYFASTEKSNIIRGWIFGTTLDSKTQSLLIVNNATNVVIKVCEFQFCNDPFLGVYYHKNNKSWMESEFRVYSSANNCTFEYVSQPFLMDLEGKQGNFKNLREFVFKNIDGYFKIYSKHTPINLVRDLPQGFSALEPLVDLPIGINITRFQTLLALHRSYLTPGDSSSGWTAGAAAYYVGYLQPRTFLLKYNENGTITDAVDCALDPLSETKCTLKSFTVEKGIYQTSNFRVQPTESIVRFPNITNLCPFGEVFNATRFASVYAWNRKRISNCVADYSVLYNSASFSTFKCYGVSPTKLNDLCFTNVYADSFVIRGDEVRQIAPGQTGKIADYNYKLPDDFTGCVIAWNSNNLDSKVGGNYNYLYRLFRKSNLKPFERDISTEIYQAGSTPCNGVEGFNCYFPLQSYGFQPTNGVGYQPYRVVVLSFELLHAPATVCGPKKSTPLVKNKCVNFNFNGLTGTGVLTESNKKFLPFQQFGRDIADITDAVRDPQTLEILDITPCSFGGVSVITPGTNTSNQVAVLYQDVNCTEVPVAIHADQLTPTWRVYSTGSNVFQTRAGCLIGAEHVNNSYECDIPIGAGICASYQTQTNSPSRAGSVASQSIIAYTMSLGAENSVAYSNNSIAIPTNFTISVTTEILPVSMTKTSVDCTMYICGDSTECSNLLLQYGSFCTQLNRALTGIAVEQDKNTQEVFAQVKQIYKTPPIKDFGGFNFSQILPDPSKPSKRSFIEDLLFNKVTLADAGFIKQYGDCLGDIAARDLICAQKFNGLTVLPPLLTDEMIAQYTSALLAGTITCGWTFGAGACLQIPFAMQMAYRFNGIGVTQNVLYENQKLIANQFNSAIGKIQDSLSSTPSALGKLQDVVNQNAQALNTLVKQLSSNFGAISSVLNDILSRLDPPEAEVQIDRLITGRLQSLQTYVTQQLIRAAEIRASANLAATKMSECVLGQSKRVDFCGKGYHLMSFPQSAPHGVVFLHVTYVPAQEKNFTTAPAICHDGKAHFPREGVFVSNGTHWFVTQRNFYEPQIITTDNTFVSGNCDVVIGIVNNTVYDPLQPELDSFKEELDKYFKNHTSPDVDLGDISGINASVVNIQKEIDRLNEVAKNLNESLIDLQELGKYEQGSGYIPEAPRDGQAYVRKDGEWVLLSTFLGRSLEVLFQGPGSLPETGGGSDYKDDDDKGGGGSGGGGSGGGGSGGGGSGGGGSHHHHHH

SEQ ID NO: 173 - protein, 1297 aa, Artificial Sequence
  source: /note="Description of Artificial Sequence: Synthetic polypeptide"
MFVFLVLLPLVSSQCVNLTTRTQLPPAYTNSFTRGVYYPDKVFRSSVLHSTQDLFLPFFSNVTWFHAIHVSGTNGTKRFDNPVLPFNDGVYFASTEKSNIIRGWIFGTTLDSKTQSLLIVNNATNVVIKVCEFQFCNDPFLGVYYHKNNKSWMESEFRVYSSANNCTFEYVSQPFLMDLEGKQGNFKNLREFVFKNIDGYFKIYSKHTPINLVRDLPQGFSALEPLVDLPIGINITRFQTLLALHRSYLTPGDSSSGWTAGAAAYYVGYLQPRTFLLKYNENGTITDAVDCALDPLSETKCTLKSFTVEKGIYQTSNFRVQPTESIVRFPNITNLCPFGEVFNATRFASVYAWNRKRISNCVADYSVLYNSASFSTFKCYGVSPTKLNDLCFTNVYADSFVIRGDEVRQIAPGQTGKIADYNYKLPDDFTGCVIAWNSNNLDSKVGGNYNYLYRLFRKSNLKPFERDISTEIYQAGSTPCNGVEGFNCYFPLQSYGFQPTNGVGYQPYRVVVLSFELLHAPATVCGPKKSTPLVKNKCVNFNFNGLTGTGVLTESNKKFLPFQQFGRDIADITDAVRDPQTLEILDITPCSFGGVSVITPGTNTSNQVAVLYQNVNCTEVPVAIHADQLTPTWRVYSTGSNVFQTRAGCLIGAEHVNNSYECDIPIGAGICASYQTQTNSPSRAGSVASQSIIAYTMSLGAENSVAYSNNSIAIPTNFTISVTTEILPVSMTKTSVDCTMYICGDSTECSNLLLQYGSFCTQLNRALTGIAVEQDKNTQEVFAQVKQIYKTPPIKDFGGFNFSQILPDPSKPSKRSFIEDLLFNKVTLADAGFIKQYGDCLGDIAARDLICAQKFNGLTVLPPLLTDEMIAQYTSALLAGTITSGWTFGAGPALQIPFAMQMAYRFNGIGVTQNVLYENQKLIANQFNSAIGKIQDSLSSTASALGKLQDVVNQNAQALNTLVKQLSSNFGAISSVLNDILSRLDPPEAEVQIDRLITGRLQSLQTYVTQQLIRAAEIRASANLAATKMSECVLGQSKRVDFCGKGYHLMSFPQSAPHGVVFLHVTYVPAQEKNFTTAPAICHDGKAHFPREGVFVSNGTHWFVTQRNFYEPQIITTDNTFVSGNCDVVIGIVNNTVYDPLQPELDSFKEELDKYFKNHTSPDVDLGDISGINASVVNIQKEIDRLNEVAKNLNESLIDLQELGKYEQGSGYIPEAPRDGQAYVRKDGEWVLLSTFLGRSLEVLFQGPGSLPETGGGSDYKDDDDKGGGGSGGGGSGGGGSGGGGSGGGGSHHHHHH

SEQ ID NO: 174 - protein, 1297 aa, Artificial Sequence
  source: /note="Description of Artificial Sequence: Synthetic polypeptide"
MFVFLVLLPLVSSQCVNLTTRTQLPPAYTNSFTRGVYYPDKVFRSSVLHSTQDLFLPFFSNVTWFHAIHVSGTNGTKRFDNPVLPFNDGVYFASTEKSNIIRGWIFGTTLDSKTQSLLIVNNATNVVIKVCEFQFCNDPFLGVYYHKNNKSWMESEFRVYSSANNCTFEYVSQPFLMDLEGKQGNFKNLREFVFKNIDGYFKIYSKHTPINLVRDLPQGFSALEPLVDLPIGINITRFQTLLALHRSYLTPGDSSSGWTAGAAAYYVGYLQPRTFLLKYNENGTITDAVDCALDPLSETKCTLKSFTVEKGIYQTSNFRVQPTESIVRFPNITNLCPFGEVFNATRFASVYAWNRKRISNCVADYSVLYNSASFSTFKCYGVSPTKLNDLCFTNVYADSFVIRGDEVRQIAPGQTGKIADYNYKLPDDFTGCVIAWNSNNLDSKVGGNYNYLYRLFRKSNLKPFERDISTEIYQAGSTPCNGVEGFNCYFPLQSYGFQPTNGVGYQPYRVVVLSFELLHAPATVCGPKKSTNLVKNKCVNFNFNGLTGTGVLTESNKKFLPFQQFGRDIADITDAVRDPQTLEILDITPCSFGGVSVITPGTNTSNQVAVLYQNVNCTEVPVAIHADQLTPTWRVYSTGSNVFQTRAGCLIGAEHVNNSYECDIPIGAGICASYQTQTNSPSRAGSVASQSIIAYTMSLGAENSVAYSNNSIAIPTNFTISVTTEILPVSMTKTSVDCTMYICGDSTECSNLLLQYGSFCTQLNRALTGIAVEQDKNTQEVFAQVKQIYKTPPIKDFGGFNFSQILPDPSKPSKRSFIEDLLFNKVTLADAGFIKQYGDCLGDIAARDLICAQKFNGLTVLPPLLTDEMIAQYTSALLACTITSGWTCGAGPALQIPFAMQMAYRFNGIGVTQNVLYENQKLIANQFNSAIGKIQDSLSSTASALGKLQDVVNQNAQALNTLVKQLSSNFGAISSVLNDILSRLDPPEAEVQIDRLITGRLQSLQTYVTQQLIRAAEIRASANLAATKMSECVLGQSKRVDFCGKGYHLMSFPQSAPHGVVFLHVTYVPAQEKNFTTAPAICHDGKAHFPREGVFVSNGTHWFVTQRNFYEPQIITTDNTFVSGNCDVVIGIVNNTVYDPLQPELDSFKEELDKYFKNHTSPDVDLGDISGINASVVNIQKEIDRLNEVAKNLNESLIDLQELGKYEQGSGYIPEAPRDGQAYVRKDGEWVLLSTFLGRSLEVLFQGPGSLPETGGGSDYKDDDDKGGGGSGGGGSGGGGSGGGGSGGGGSHHHHHH

SEQ ID NO: 175 - protein, 1297 aa, Artificial Sequence
  source: /note="Description of Artificial Sequence: Synthetic polypeptide"
MFVFLVLLPLVSSQCVNLTTRTQLPPAYTNSFTRGVYYPDKVFRSSVLHSTQDLFLPFFSNVTWFHAIHVSGTNGTKRFDNPVLPFNDGVYFASTEKSNIIRGWIFGTTLDSKTQSLLIVNNATNVVIKVCEFQFCNDPFLGVYYHKNNKSWMESEFRVYSSANNCTFEYVSQPFLMDLEGKQGNFKNLREFVFKNIDGYFKIYSKHTPINLVRDLPQGFSALEPLVDLPIGINITRFQTLLALHRSYLTPGDSSSGWTAGAAAYYVGYLQPRTFLLKYNENGTITDAVDCALDPLSETKCTLKSFTVEKGIYQTSNFRVQPTESIVRFPNITNLCPFGEVFNATRFASVYAWNRKRISNCVADYSVLYNSASFSTFKCYGVSPTKLNDLCFTNVYADSFVIRGDEVRQIAPGQTGKIADYNYKLPDDFTGCVIAWNSNNLDSKVGGNYNYLYRLFRKSNLKPFERDISTEIYQAGSTPCNGVEGFNCYFPLQSYGFQPTNGVGYQPYRVVVLSFELLHAPATVCGPKKSTNLVKNKCVNFNFNGLTGTGVLTESNKKFLPFQQFGRDIADITDAVRDPQTLEILDITPCSFGGVSVITPGTNTSNQVAVLYQNVNCTEVPVAIHADQLTPTWRVYSTGSNVFQTRAGCLIGAEHVNNSYECDIPIGAGICASYQTQTNSPSRAGSVASQSIIAYTMSLGAENSVAYSNNSIAIPTNFTISVTTEILPVSMTKTSVDCTMYICGDSTECSNLLLQYGSFCTQLNRALTGIAVEQDKNTQEVFAQVKQIYKTPPIKDFGGFNFSQILPDPSKPSKRSFIEDLLFNKVTLADAGFIKQYGDCLGDIAARDLICAQKFNGLTVLPPLLTDEMIAQYTSALLAGTITCGWTFGAGPCLQIPFAMQMAYRFNGIGVTQNVLYENQKLIANQFNSAIGKIQDSLSSTASALGKLQDVVNQNAQALNTLVKQLSSNFGAISSVLNDILSRLDPPEAEVQIDRLITGRLQSLQTYVTQQLIRAAEIRASANLAATKMSECVLGQSKRVDFCGKGYHLMSFPQSAPHGVVFLHVTYVPAQEKNFTTAPAICHDGKAHFPREGVFVSNGTHWFVTQRNFYEPQIITTDNTFVSGNCDVVIGIVNNTVYDPLQPELDSFKEELDKYFKNHTSPDVDLGDISGINASVVNIQKEIDRLNEVAKNLNESLIDLQELGKYEQGSGYIPEAPRDGQAYVRKDGEWVLLSTFLGRSLEVLFQGPGSLPETGGGSDYKDDDDKGGGGSGGGGSGGGGSGGGGSGGGGSHHHHHH

SEQ ID NO: 176 - protein, 1297 aa, Artificial Sequence
  source: /note="Description of Artificial Sequence: Synthetic polypeptide"
MFVFLVLLPLVSSQCVNLTTRTQLPPAYTNSFTRGVYYPDKVFRSSVLHSTQDLFLPFFSNVTWFHAIHVSGTNGTKRFDNPVLPFNDGVYFASTEKSNIIRGWIFGTTLDSKTQSLLIVNNATNVVIKVCEFQFCNDPFLGVYYHKNNKSWMESEFRVYSSANNCTFEYVSQPFLMDLEGKQGNFKNLREFVFKNIDGYFKIYSKHTPINLVRDLPQGFSALEPLVDLPIGINITRFQTLLALHRSYLTPGDSSSGWTAGAAAYYVGYLQPRTFLLKYNENGTITDAVDCALDPLSETKCTLKSFTVEKGIYQTSNFRVQPTESIVRFPNITNLCPFGEVFNATRFASVYAWNRKRISNCVADYSVLYNSASFSTFKCYGVSPTKLNDLCFTNVYADSFVIRGDEVRQIAPGQTGKIADYNYKLPDDFTGCVIAWNSNNLDSKVGGNYNYLYRLFRKSNLKPFERDISTEIYQAGSTPCNGVEGFNCYFPLQSYGFQPTNGVGYQPYRVVVLSFELLHAPATVCGPKKSTPLVKNKCVNFNFNGLTGTGVLTESNKKFLPFQQFGRDIADTTDAVRDPQTLEILDITPCSFGGVSVITPGTNTSNQVAVLYQNVNCTEVPVAIHADQLTPTWRVYSTGSNVFQTRAGCLIGAEHVNNSYECDIPIGAGICASYQTQTNSPSRAGSVASQSIIAYTMSLGAENSVAYSNNSIAIPTNFTISVTTEILPVSMTKTSVDCTMYICGDSTECSNLLLQYGSFCTQLNRALTGIAVEQDKNTQEVFAQVKQIYKTPPIKDFGGFNFSQILPDPSKPSKRSFIEDLLFNKVTLADAGFIKQYGDCLGDIAARDLICAQKFNGLTVLPPLLTDEMIAQYTSALLACTITSGWTCGAGPALQIPFAMQMAYRFNGIGVTQNVLYENQKLIANQFNSAIGKIQDSLSSTASALGKLQDVVNQNAQALNTLVKQLSSNFGAISSVLNDILSRLDPPEAEVQIDRLITGRLQSLQTYVTQQLIRAAEIRASANLAATKMSECVLGQSKRVDFCGKGYHLMSFPQSAPHGVVFLHVTYVPAQEKNFTTAPAICHDGKAHFPREGVFVSNGTHWFVTQRNFYEPQIITTDNTFVSGNCDVVIGIVNNTVYDPLQPELDSFKEELDKYFKNHTSPDVDLGDISGINASVVNIQKEIDRLNEVAKNLNESLIDLQELGKYEQGSGYIPEAPRDGQAYVRKDGEWVLLSTFLGRSLEVLFQGPGSLPETGGGSDYKDDDDKGGGGSGGGGSGGGGSGGGGSGGGGSHHHHHH

SEQ ID NO: 177 - protein, 1297 aa, Artificial Sequence
  source: /note="Description of Artificial Sequence: Synthetic polypeptide"
MFVFLVLLPLVSSQCVNLTTRTQLPPAYTNSFTRGVYYPDKVFRSSVLHSTQDLFLPFFSNVTWFHAIHVSGTNGTKRFDNPVLPFNDGVYFASTEKSNIIRGWIFGTTLDSKTQSLLIVNNATNVVIKVCEFQFCNDPFLGVYYHKNNKSWMESEFRVYSSANNCTFEYVSQPFLMDLEGKQGNFKNLREFVFKNIDGYFKIYSKHTPINLVRDLPQGFSALEPLVDLPIGINITRFQTLLALHRSYLTPGDSSSGWTAGAAAYYVGYLQPRTFLLKYNENGTITDAVDCALDPLSETKCTLKSFTVEKGIYQTSNFRVQPTESIVRFPNITNLCPFGEVFNATRFASVYAWNRKRISNCVADYSVLYNSASFSTFKCYGVSPTKLNDLCFTNVYADSFVIRGDEVRQIAPGQTGKIADYNYKLPDDFTGCVIAWNSNNLDSKVGGNYNYLYRLFRKSNLKPFERDISTEIYQAGSTPCNGVEGFNCYFPLQSYGFQPTNGVGYQPYRVVVLSFELLHAPATVCGPKKSTPLVKNKCVNFNFNGLTGTGVLTESNKKFLPFQQFGRDIADTTDAVRDPQTLEILDITPCSFGGVSVITPGTNTSNQVAVLYQNVNCTEVPVAIHADQLTPTWRVYSTGSNVFQTRAGCLIGAEHVNNSYECDIPIGAGICASYQTQTNSPSRAGSVASQSIIAYTMSLGAENSVAYSNNSIAIPTNFTISVTTEILPVSMTKTSVDCTMYICGDSTECSNLLLQYGSFCTQLNRALTGIAVEQDKNTQEVFAQVKQIYKTPPIKDFGGFNFSQILPDPSKPSKRSFIEDLLFNKVTLADAGFIKQYGDCLGDIAARDLICAQKFNGLTVLPPLLTDEMIAQYTSALLAGTITCGWTFGAGPCLQIPFAMQMAYRFNGIGVTQNVLYENQKLIANQFNSAIGKIQDSLSSTASALGKLQDVVNQNAQALNTLVKQLSSNFGAISSVLNDILSRLDPPEAEVQIDRLITGRLQSLQTYVTQQLIRAAEIRASANLAATKMSECVLGQSKRVDFCGKGYHLMSFPQSAPHGVVFLHVTYVPAQEKNFTTAPAICHDGKAHFPREGVFVSNGTHWFVTQRNFYEPQIITTDNTFVSGNCDVVIGIVNNTVYDPLQPELDSFKEELDKYFKNHTSPDVDLGDISGINASVVNIQKEIDRLNEVAKNLNESLIDLQELGKYEQGSGYIPEAPRDGQAYVRKDGEWVLLSTFLGRSLEVLFQGPGSLPETGGGSDYKDDDDKGGGGSGGGGSGGGGSGGGGSGGGGSHHHHHH

SEQ ID NO: 178 - protein, 1297 aa, Artificial Sequence
  source: /note="Description of Artificial Sequence: Synthetic polypeptide"
MFVFLVLLPLVSSQCVNLTTRTQLPPAYTNSFTRGVYYPDKVFRSSVLHSTQDLFLPFFSNVTWFHAIHVSGTNGTKRFDNPVLPFNDGVYFASTEKSNIIRGWIFGTTLDSKTQSLLIVNNATNVVIKVCEFQFCNDPFLGVYYHKNNKSWMESEFRVYSSANNCTFEYVSQPFLMDLEGKQGNFKNLREFVFKNIDGYFKIYSKHTPINLVRDLPQGFSALEPLVDLPIGINITRFQTLLALHRSYLTPGDSSSGWTAGAAAYYVGYLQPRTFLLKYNENGTITDAVDCALDPLSETKCTLKSFTVEKGIYQTSNFRVQPTESIVRFPNITNLCPFGEVFNATRFASVYAWNRKRISNCVADYSVLYNSASFSTFKCYGVSPTKLNDLCFTNVYADSFVIRGDEVRQIAPGQTGKIADYNYKLPDDFTGCVIAWNSNNLDSKVGGNYNYLYRLFRKSNLKPFERDISTEIYQAGSTPCNGVEGFNCYFPLQSYGFQPTNGVGYQPYRVVVLSFELLHAPATVCGPKKSTPLVKNKCVNFNFNGLTGTGVLTESNKKFLPFQQFGRDIADITDAVRDPQTLEILDITPCSFGGVSVITPGTNTSNQVAVLYQDVNCTEVPVAIHADQLTPTWRVYSTGSNVFQTRAGCLIGAEHVNNSYECDIPIGAGICASYQTQTNSPSRAGSVASQSIIAYTMSLGAENSVAYSNNSIAIPTNFTISVTTEILPVSMTKTSVDCTMYICGDSTECSNLLLQYGSFCTQLNRALTGIAVEQDKNTQEVFAQVKQIYKTPPIKDFGGFNFSQILPDPSKPSKRSFIEDLLFNKVTLADAGFIKQYGDCLGDIAARDLICAQKFNGLTVLPPLLTDEMIAQYTSALLACTITSGWTCGAGPALQIPFAMQMAYRFNGIGVTQNVLYENQKLIANQFNSAIGKIQDSLSSTASALGKLQDVVNQNAQALNTLVKQLSSNFGAISSVLNDILSRLDPPEAEVQIDRLITGRLQSLQTYVTQQLIRAAEIRASANLAATKMSECVLGQSKRVDFCGKGYHLMSFPQSAPHGVVFLHVTYVPAQEKNFTTAPAICHDGKAHFPREGVFVSNGTHWFVTQRNFYEPQIITTDNTFVSGNCDVVIGIVNNTVYDPLQPELDSFKEELDKYFKNHTSPDVDLGDISGINASVVNIQKEIDRLNEVAKNLNESLIDLQELGKYEQGSGYIPEAPRDGQAYVRKDGEWVLLSTFLGRSLEVLFQGPGSLPETGGGSDYKDDDDKGGGGSGGGGSGGGGSGGGGSGGGGSHHHHHH

SEQ ID NO: 179 - protein, 1297 aa, Artificial Sequence
  source: /note="Description of Artificial Sequence: Synthetic polypeptide"
MFVFLVLLPLVSSQCVNLTTRTQLPPAYTNSFTRGVYYPDKVFRSSVLHSTQDLFLPFFSNVTWFHAIHVSGTNGTKRFDNPVLPFNDGVYFASTEKSNIIRGWIFGTTLDSKTQSLLIVNNATNVVIKVCEFQFCNDPFLGVYYHKNNKSWMESEFRVYSSANNCTFEYVSQPFLMDLEGKQGNFKNLREFVFKNIDGYFKIYSKHTPINLVRDLPQGFSALEPLVDLPIGINITRFQTLLALHRSYLTPGDSSSGWTAGAAAYYVGYLQPRTFLLKYNENGTITDAVDCALDPLSETKCTLKSFTVEKGIYQTSNFRVQPTESIVRFPNITNLCPFGEVFNATRFASVYAWNRKRISNCVADYSVLYNSASFSTFKCYGVSPTKLNDLCFTNVYADSFVIRGDEVRQIAPGQTGKIADYNYKLPDDFTGCVIAWNSNNLDSKVGGNYNYLYRLFRKSNLKPFERDISTEIYQAGSTPCNGVEGFNCYFPLQSYGFQPTNGVGYQPYRVVVLSFELLHAPATVCGPKKSTPLVKNKCVNFNFNGLTGTGVLTESNKKFLPFQQFGRDIADITDAVRDPQTLEILDITPCSFGGVSVITPGTNTSNQVAVLYQDVNCTEVPVAIHADQLTPTWRVYSTGSNVFQTRAGCLIGAEHVNNSYECDIPIGAGICASYQTQTNSPSRAGSVASQSIIAYTMSLGAENSVAYSNNSIAIPTNFTISVTTEILPVSMTKTSVDCTMYICGDSTECSNLLLQYGSFCTQLNRALTGIAVEQDKNTQEVFAQVKQIYKTPPIKDFGGFNFSQILPDPSKPSKRSFIEDLLFNKVTLADAGFIKQYGDCLGDIAARDLICAQKFNGLTVLPPLLTDEMIAQYTSALLAGTITCGWTFGAGPCLQIPFAMQMAYRFNGIGVTQNVLYENQKLIANQFNSAIGKIQDSLSSTASALGKLQDVVNQNAQALNTLVKQLSSNFGAISSVLNDILSRLDPPEAEVQIDRLITGRLQSLQTYVTQQLIRAAEIRASANLAATKMSECVLGQSKRVDFCGKGYHLMSFPQSAPHGVVFLHVTYVPAQEKNFTTAPAICHDGKAHFPREGVFVSNGTHWFVTQRNFYEPQIITTDNTFVSGNCDVVIGIVNNTVYDPLQPELDSFKEELDKYFKNHTSPDVDLGDISGINASVVNIQKEIDRLNEVAKNLNESLIDLQELGKYEQGSGYIPEAPRDGQAYVRKDGEWVLLSTFLGRSLEVLFQGPGSLPETGGGSDYKDDDDKGGGGSGGGGSGGGGSGGGGSGGGGSHHHHHH

SEQ ID NO: 180 - protein, 1297 aa, Artificial Sequence
  source: /note="Description of Artificial Sequence: Synthetic polypeptide"
MFVFLVLLPLVSSQCVNLTTRTQLPPAYTNSFTRGVYYPDKVFRSSVLHSTQDLFLPFFSNVTWFHAIHVSGTNGTKRFDNPVLPFNDGVYFASTEKSNIIRGWIFGTTLDSKTQSLLIVNNATNVVIKVCEFQFCNDPFLGVYYHKNNKSWMESEFRVYSSANNCTFEYVSQPFLMDLEGKQGNFKNLREFVFKNIDGYFKIYSKHTPINLVRDLPQGFSALEPLVDLPIGINITRFQTLLALHRSYLTPGDSSSGWTAGAAAYYVGYLQPRTFLLKYNENGTITDAVDCALDPLSETKCTLKSFTVEKGIYQTSNFRVQPTESIVRFPNITNLCPFGEVFNATRFASVYAWNRKRISNCVADYSVLYNSASFSTFKCYGVSPTKLNDLCFTNVYADSFVIRGDEVRQIAPGQTGKIADYNYKLPDDFTGCVIAWNSNNLDSKVGGNYNYLYRLFRKSNLKPFERDISTEIYQAGSTPCNGVEGFNCYFPLQSYGFQPTNGVGYQPYRVVVLSFELLHAPATVCGPKKSTPLVKNKCVNFNFNGLTGTGVLTESNKKFLPFQQFGRDIADITDAVRDPQTLEILDITPCSFGGVSVITPGTNTSNQVAVLYQNVNCTEVPVAIHADQLTPTWRVYSTGSNVFQTRAGCLIGAEHVNNSYECDIPIGAGICASYQTQTNSPSRAGSVASQSIIAYTMSLGAENSVAYSNNSIAIPTNFTISVTTEILPVSMTKTSVDCTMYICGDSTECSNLLLQYGSFCTQLNRALTGIAVEQDKNTQEVFAQVKQIYKTPPIKDFGGFNFSQILPDPSKPSKRSFIEDLLFNKVTLADAGFIKQYGDCLGDIAARDLICAQKFNGLTVLPPLLTDEMIAQYTSALLACTITSGWTCGAGAALQIPFAMQMAYRFNGIGVTQNVLYENQKLIANQFNSAIGKIQDSLSSTASALGKLQDVVNQNAQALNTLVKQLSSNFGAISSVLNDILSRLDPPEAEVQIDRLITGRLQSLQTYVTQQLIRAAEIRASANLAATKMSECVLGQSKRVDFCGKGYHLMSFPQSAPHGVVFLHVTYVPAQEKNFTTAPAICHDGKAHFPREGVFVSNGTHWFVTQRNFYEPQIITTDNTFVSGNCDVVIGIVNNTVYDPLQPELDSFKEELDKYFKNHTSPDVDLGDISGINASVVNIQKEIDRLNEVAKNLNESLIDLQELGKYEQGSGYIPEAPRDGQAYVRKDGEWVLLSTFLGRSLEVLFQGPGSLPETGGGSDYKDDDDKGGGGSGGGGSGGGGSGGGGSGGGGSHHHHHH

SEQ ID NO: 181 - protein, 1297 aa, Artificial Sequence
  source: /note="Description of Artificial Sequence: Synthetic polypeptide"
MFVFLVLLPLVSSQCVNLTTRTQLPPAYTNSFTRGVYYPDKVFRSSVLHSTQDLFLPFFSNVTWFHAIHVSGTNGTKRFDNPVLPFNDGVYFASTEKSNIIRGWIFGTTLDSKTQSLLIVNNATNVVIKVCEFQFCNDPFLGVYYHKNNKSWMESEFRVYSSANNCTFEYVSQPFLMDLEGKQGNFKNLREFVFKNIDGYFKIYSKHTPINLVRDLPQGFSALEPLVDLPIGINITRFQTLLALHRSYLTPGDSSSGWTAGAAAYYVGYLQPRTFLLKYNENGTITDAVDCALDPLSETKCTLKSFTVEKGIYQTSNFRVQPTESIVRFPNITNLCPFGEVFNATRFASVYAWNRKRISNCVADYSVLYNSASFSTFKCYGVSPTKLNDLCFTNVYADSFVIRGDEVRQIAPGQTGKIADYNYKLPDDFTGCVIAWNSNNLDSKVGGNYNYLYRLFRKSNLKPFERDISTEIYQAGSTPCNGVEGFNCYFPLQSYGFQPTNGVGYQPYRVVVLSFELLHAPATVCGPKKSTPLVKNKCVNFNFNGLTGTGVLTESNKKFLPFQQFGRDIADITDAVRDPQTLEILDITPCSFGGVSVITPGTNTSNQVAVLYQNVNCTEVPVAIHADQLTPTWRVYSTGSNVFQTRAGCLIGAEHVNNSYECDIPIGAGICASYQTQTNSPSRAGSVASQSIIAYTMSLGAENSVAYSNNSIAIPTNFTISVTTEILPVSMTKTSVDCTMYICGDSTECSNLLLQYGSFCTQLNRALTGIAVEQDKNTQEVFAQVKQIYKTPPIKDFGGFNFSQILPDPSKPSKRSFIEDLLFNKVTLADAGFIKQYGDCLGDIAARDLICAQKFNGLTVLPPLLTDEMIAQYTSALLAGTITCGWTFGAGACLQIPFAMQMAYRFNGIGVTQNVLYENQKLIANQFNSAIGKIQDSLSSTASALGKLQDVVNQNAQALNTLVKQLSSNFGAISSVLNDILSRLDPPEAEVQIDRLITGRLQSLQTYVTQQLIRAAEIRASANLAATKMSECVLGQSKRVDFCGKGYHLMSFPQSAPHGVVFLHVTYVPAQEKNFTTAPAICHDGKAHFPREGVFVSNGTHWFVTQRNFYEPQIITTDNTFVSGNCDVVIGIVNNTVYDPLQPELDSFKEELDKYFKNHTSPDVDLGDISGINASVVNIQKEIDRLNEVAKNLNESLIDLQELGKYEQGSGYIPEAPRDGQAYVRKDGEWVLLSTFLGRSLEVLFQGPGSLPETGGGSDYKDDDDKGGGGSGGGGSGGGGSGGGGSGGGGSHHHHHH

SEQ ID NO: 182 - protein, 1297 aa, Artificial Sequence
  source: /note="Description of Artificial Sequence: Synthetic polypeptide"
MFVFLVLLPLVSSQCVNLTTRTQLPPAYTNSFTRGVYYPDKVFRSSVLHSTQDLFLPFFSNVTWFHAIHVSGTNGTKRFDNPVLPFNDGVYFASTEKSNIIRGWIFGTTLDSKTQSLLIVNNATNVVIKVCEFQFCNDPFLGVYYHKNNKSWMESEFRVYSSANNCTFEYVSQPFLMDLEGKQGNFKNLREFVFKNIDGYFKIYSKHTPINLVRDLPQGFSALEPLVDLPIGINITRFQTLLALHRSYLTPGDSSSGWTAGAAAYYVGYLQPRTFLLKYNENGTITDAVDCALDPLSETKCTLKSFTVEKGIYQTSNFRVQPTESIVRFPNITNLCPFGEVFNATRFASVYAWNRKRISNCVADYSVLYNSASFSTFKCYGVSPTKLNDLCFTNVYADSFVIRGDEVRQIAPGQTGKIADYNYKLPDDFTGCVIAWNSNNLDSKVGGNYNYLYRLFRKSNLKPFERDISTEIYQAGSTPCNGVEGFNCYFPLQSYGFQPTNGVGYQPYRVVVLSFELLHAPATVCGPKKSTPLVKNKCVNFNFNGLTGTGVLTESNKKFLPFQQFGRDIADITDAVRDPQTLEILDITPCSFGGVSVITPGTNTSNQVAVLYQNVNCTEVPVAIHADQLTPTWRVYSTGSNVFQTRAGCLIGAEHVNNSYECDIPIGAGICASYQTQTNSPSRAGSVASQSIIAYTMSLGAENSVAYSNNSIAIPTNFTISVTTEILPVSMTKTSVDCTMYICGDSTECSNLLLQYGSFCTQLNRALTGIAVEQDKNTQEVFAQVKQIYKTPPIKDFGGFNFSQILPDPSKPSKRSFIEDLLFNKVTLADAGFIKQYGDCLGDIAARDLICAQKFNGLTVLPPLLTDEMIAQYTSALLAGTITSGWTFGAGPALQIPFAMQMAYRFNGIGVTQNVLYENQKLIANQFNSAIGKIQDSLSSTPSALGKLQDVVNQNAQALNTLVKQLSSNFGAISSVLNDILSRLDPPEAEVQIDRLITGRLQSLQTYVTQQLIRAAEIRASANLAATKMSECVLGQSKRVDFCGKGYHLMSFPQSAPHGVVFLHVTYVPAQEKNFTTAPAICHDGKAHFPREGVFVSNGTHWFVTQRNFYEPQIITTDNTFVSGNCDVVIGIVNNTVYDPLQPELDSFKEELDKYFKNHTSPDVDLGDISGINASVVNIQKEIDRLNEVAKNLNESLIDLQELGKYEQGSGYIPEAPRDGQAYVRKDGEWVLLSTFLGRSLEVLFQGPGSLPETGGGSDYKDDDDKGGGGSGGGGSGGGGSGGGGSGGGGSHHHHHH

SEQ ID NO: 183 - protein, 1297 aa, Artificial Sequence
  source: /note="Description of Artificial Sequence: Synthetic polypeptide"
MFVFLVLLPLVSSQCVNLTTRTQLPPAYTNSFTRGVYYPDKVFRSSVLHSTQDLFLPFFSNVTWFHAIHVSGTNGTKRFDNPVLPFNDGVYFASTEKSNIIRGWIFGTTLDSKTQSLLIVNNATNVVIKVCEFQFCNDPFLGVYYHKNNKSWMESEFRVYSSANNCTFEYVSQPFLMDLEGKQGNFKNLREFVFKNIDGYFKIYSKHTPINLVRDLPQGFSALEPLVDLPIGINITRFQTLLALHRSYLTPGDSSSGWTAGAAAYYVGYLQPRTFLLKYNENGTITDAVDCALDPLSETKCTLKSFTVEKGIYQTSNFRVQPTESIVRFPNITNLCPFGEVFNATRFASVYAWNRKRISNCVADYSVLYNSASFSTFKCYGVSPTKLNDLCFTNVYADSFVIRGDEVRQIAPGQTGKIADYNYKLPDDFTGCVIAWNSNNLDSKVGGNYNYLYRLFRKSNLKPFERDISTEIYQAGSTPCNGVEGFNCYFPLQSYGFQPTNGVGYQPYRVVVLSFELLHAPATVCGPKKSTNLVKNKCVNFNFNGLTGTGVLTESNKKFLPFQQFGRDIADITDAVRDPQTLEILDITPCSFGGVSVITPGTNTSNQVAVLYQNVNCTEVPVAIHADQLTPTWRVYSTGSNVFQTRAGCLIGAEHVNNSYECDIPIGAGICASYQTQTNSPSRAGSVASQSIIAYTMSLGAENSVAYSNNSIAIPTNFTISVTTEILPVSMTKTSVDCTMYICGDSTECSNLLLQYGSFCTQLNRALTGIAVEQDKNTQEVFAQVKQIYKTPPIKDFGGFNFSQILPDPSKPSKRSFIEDLLFNKVTLADAGFIKQYGDCLGDIAARDLICAQKFNGLTVLPPLLTDEMIAQYTSALLACTITSGWTCGAGPALQIPFAMQMAYRFNGIGVTQNVLYENQKLIANQFNSAIGKIQDSLSSTPSALGKLQDVVNQNAQALNTLVKQLSSNFGAISSVLNDILSRLDPPEAEVQIDRLITGRLQSLQTYVTQQLIRAAEIRASANLAATKMSECVLGQSKRVDFCGKGYHLMSFPQSAPHGVVFLHVTYVPAQEKNFTTAPAICHDGKAHFPREGVFVSNGTHWFVTQRNFYEPQIITTDNTFVSGNCDVVIGIVNNTVYDPLQPELDSFKEELDKYFKNHTSPDVDLGDISGINASVVNIQKEIDRLNEVAKNLNESLIDLQELGKYEQGSGYIPEAPRDGQAYVRKDGEWVLLSTFLGRSLEVLFQGPGSLPETGGGSDYKDDDDKGGGGSGGGGSGGGGSGGGGSGGGGSHHHHHH

SEQ ID NO: 184 - protein, 1297 aa, Artificial Sequence
  source: /note="Description of Artificial Sequence: Synthetic polypeptide"
MFVFLVLLPLVSSQCVNLTTRTQLPPAYTNSFTRGVYYPDKVFRSSVLHSTQDLFLPFFSNVTWFHAIHVSGTNGTKRFDNPVLPFNDGVYFASTEKSNIIRGWIFGTTLDSKTQSLLIVNNATNVVIKVCEFQFCNDPFLGVYYHKNNKSWMESEFRVYSSANNCTFEYVSQPFLMDLEGKQGNFKNLREFVFKNIDGYFKIYSKHTPINLVRDLPQGFSALEPLVDLPIGINITRFQTLLALHRSYLTPGDSSSGWTAGAAAYYVGYLQPRTFLLKYNENGTITDAVDCALDPLSETKCTLKSFTVEKGIYQTSNFRVQPTESIVRFPNITNLCPFGEVFNATRFASVYAWNRKRISNCVADYSVLYNSASFSTFKCYGVSPTKLNDLCFTNVYADSFVIRGDEVRQIAPGQTGKIADYNYKLPDDFTGCVIAWNSNNLDSKVGGNYNYLYRLFRKSNLKPFERDISTEIYQAGSTPCNGVEGFNCYFPLQSYGFQPTNGVGYQPYRVVVLSFELLHAPATVCGPKKSTNLVKNKCVNFNFNGLTGTGVLTESNKKFLPFQQFGRDIADITDAVRDPQTLEILDITPCSFGGVSVITPGTNTSNQVAVLYQNVNCTEVPVAIHADQLTPTWRVYSTGSNVFQTRAGCLIGAEHVNNSYECDIPIGAGICASYQTQTNSPSRAGSVASQSIIAYTMSLGAENSVAYSNNSIAIPTNFTISVTTEILPVSMTKTSVDCTMYICGDSTECSNLLLQYGSFCTQLNRALTGIAVEQDKNTQEVFAQVKQIYKTPPIKDFGGFNFSQILPDPSKPSKRSFIEDLLFNKVTLADAGFIKQYGDCLGDIAARDLICAQKFNGLTVLPPLLTDEMIAQYTSALLAGTITCGWTFGAGPCLQIPFAMQMAYRFNGIGVTQNVLYENQKLIANQFNSAIGKIQDSLSSTPSALGKLQDVVNQNAQALNTLVKQLSSNFGAISSVLNDILSRLDPPEAEVQIDRLITGRLQSLQTYVTQQLIRAAEIRASANLAATKMSECVLGQSKRVDFCGKGYHLMSFPQSAPHGVVFLHVTYVPAQEKNFTTAPAICHDGKAHFPREGVFVSNGTHWFVTQRNFYEPQIITTDNTFVSGNCDVVIGIVNNTVYDPLQPELDSFKEELDKYFKNHTSPDVDLGDISGINASVVNIQKEIDRLNEVAKNLNESLIDLQELGKYEQGSGYIPEAPRDGQAYVRKDGEWVLLSTFLGRSLEVLFQGPGSLPETGGGSDYKDDDDKGGGGSGGGGSGGGGSGGGGSGGGGSHHHHHH

SEQ ID NO: 185 - protein, 1297 aa, Artificial Sequence
  source: /note="Description of Artificial Sequence: Synthetic polypeptide"
MFVFLVLLPLVSSQCVNLTTRTQLPPAYTNSFTRGVYYPDKVFRSSVLHSTQDLFLPFFSNVTWFHAIHVSGTNGTKRFDNPVLPFNDGVYFASTEKSNIIRGWIFGTTLDSKTQSLLIVNNATNVVIKVCEFQFCNDPFLGVYYHKNNKSWMESEFRVYSSANNCTFEYVSQPFLMDLEGKQGNFKNLREFVFKNIDGYFKIYSKHTPINLVRDLPQGFSALEPLVDLPIGINITRFQTLLALHRSYLTPGDSSSGWTAGAAAYYVGYLQPRTFLLKYNENGTITDAVDCALDPLSETKCTLKSFTVEKGIYQTSNFRVQPTESIVRFPNITNLCPFGEVFNATRFASVYAWNRKRISNCVADYSVLYNSASFSTFKCYGVSPTKLNDLCFTNVYADSFVIRGDEVRQIAPGQTGKIADYNYKLPDDFTGCVIAWNSNNLDSKVGGNYNYLYRLFRKSNLKPFERDISTEIYQAGSTPCNGVEGFNCYFPLQSYGFQPTNGVGYQPYRVVVLSFELLHAPATVCGPKKSTPLVKNKCVNFNFNGLTGTGVLTESNKKFLPFQQFGRDIADTTDAVRDPQTLEILDITPCSFGGVSVITPGTNTSNQVAVLYQNVNCTEVPVAIHADQLTPTWRVYSTGSNVFQTRAGCLIGAEHVNNSYECDIPIGAGICASYQTQTNSPSRAGSVASQSIIAYTMSLGAENSVAYSNNSIAIPTNFTISVTTEILPVSMTKTSVDCTMYICGDSTECSNLLLQYGSFCTQLNRALTGIAVEQDKNTQEVFAQVKQIYKTPPIKDFGGFNFSQILPDPSKPSKRSFIEDLLFNKVTLADAGFIKQYGDCLGDIAARDLICAQKFNGLTVLPPLLTDEMIAQYTSALLACTITSGWTCGAGPALQIPFAMQMAYRFNGIGVTQNVLYENQKLIANQFNSAIGKIQDSLSSTPSALGKLQDVVNQNAQALNTLVKQLSSNFGAISSVLNDILSRLDPPEAEVQIDRLITGRLQSLQTYVTQQLIRAAEIRASANLAATKMSECVLGQSKRVDFCGKGYHLMSFPQSAPHGVVFLHVTYVPAQEKNFTTAPAICHDGKAHFPREGVFVSNGTHWFVTQRNFYEPQIITTDNTFVSGNCDVVIGIVNNTVYDPLQPELDSFKEELDKYFKNHTSPDVDLGDISGINASVVNIQKEIDRLNEVAKNLNESLIDLQELGKYEQGSGYIPEAPRDGQAYVRKDGEWVLLSTFLGRSLEVLFQGPGSLPETGGGSDYKDDDDKGGGGSGGGGSGGGGSGGGGSGGGGSHHHHHH

SEQ ID NO: 186 - protein, 1297 aa, Artificial Sequence
  source: /note="Description of Artificial Sequence: Synthetic polypeptide"
MFVFLVLLPLVSSQCVNLTTRTQLPPAYTNSFTRGVYYPDKVFRSSVLHSTQDLFLPFFSNVTWFHAIHVSGTNGTKRFDNPVLPFNDGVYFASTEKSNIIRGWIFGTTLDSKTQSLLIVNNATNVVIKVCEFQFCNDPFLGVYYHKNNKSWMESEFRVYSSANNCTFEYVSQPFLMDLEGKQGNFKNLREFVFKNIDGYFKIYSKHTPINLVRDLPQGFSALEPLVDLPIGINITRFQTLLALHRSYLTPGDSSSGWTAGAAAYYVGYLQPRTFLLKYNENGTITDAVDCALDPLSETKCTLKSFTVEKGIYQTSNFRVQPTESIVRFPNITNLCPFGEVFNATRFASVYAWNRKRISNCVADYSVLYNSASFSTFKCYGVSPTKLNDLCFTNVYADSFVIRGDEVRQIAPGQTGKIADYNYKLPDDFTGCVIAWNSNNLDSKVGGNYNYLYRLFRKSNLKPFERDISTEIYQAGSTPCNGVEGFNCYFPLQSYGFQPTNGVGYQPYRVVVLSFELLHAPATVCGPKKSTPLVKNKCVNFNFNGLTGTGVLTESNKKFLPFQQFGRDIADTTDAVRDPQTLEILDITPCSFGGVSVITPGTNTSNQVAVLYQNVNCTEVPVAIHADQLTPTWRVYSTGSNVFQTRAGCLIGAEHVNNSYECDIPIGAGICASYQTQTNSPSRAGSVASQSIIAYTMSLGAENSVAYSNNSIAIPTNFTISVTTEILPVSMTKTSVDCTMYICGDSTECSNLLLQYGSFCTQLNRALTGIAVEQDKNTQEVFAQVKQIYKTPPIKDFGGFNFSQILPDPSKPSKRSFIEDLLFNKVTLADAGFIKQYGDCLGDIAARDLICAQKFNGLTVLPPLLTDEMIAQYTSALLAGTITCGWTFGAGPCLQIPFAMQMAYRFNGIGVTQNVLYENQKLIANQFNSAIGKIQDSLSSTPSALGKLQDVVNQNAQALNTLVKQLSSNFGAISSVLNDILSRLDPPEAEVQIDRLITGRLQSLQTYVTQQLIRAAEIRASANLAATKMSECVLGQSKRVDFCGKGYHLMSFPQSAPHGVVFLHVTYVPAQEKNFTTAPAICHDGKAHFPREGVFVSNGTHWFVTQRNFYEPQIITTDNTFVSGNCDVVIGIVNNTVYDPLQPELDSFKEELDKYFKNHTSPDVDLGDISGINASVVNIQKEIDRLNEVAKNLNESLIDLQELGKYEQGSGYIPEAPRDGQAYVRKDGEWVLLSTFLGRSLEVLFQGPGSLPETGGGSDYKDDDDKGGGGSGGGGSGGGGSGGGGSGGGGSHHHHHH

SEQ ID NO: 187 - protein, 1297 aa, Artificial Sequence
  source: /note="Description of Artificial Sequence: Synthetic polypeptide"
MFVFLVLLPLVSSQCVNLTTRTQLPPAYTNSFTRGVYYPDKVFRSSVLHSTQDLFLPFFSNVTWFHAIHVSGTNGTKRFDNPVLPFNDGVYFASTEKSNIIRGWIFGTTLDSKTQSLLIVNNATNVVIKVCEFQFCNDPFLGVYYHKNNKSWMESEFRVYSSANNCTFEYVSQPFLMDLEGKQGNFKNLREFVFKNIDGYFKIYSKHTPINLVRDLPQGFSALEPLVDLPIGINITRFQTLLALHRSYLTPGDSSSGWTAGAAAYYVGYLQPRTFLLKYNENGTITDAVDCALDPLSETKCTLKSFTVEKGIYQTSNFRVQPTESIVRFPNITNLCPFGEVFNATRFASVYAWNRKRISNCVADYSVLYNSASFSTFKCYGVSPTKLNDLCFTNVYADSFVIRGDEVRQIAPGQTGKIADYNYKLPDDFTGCVIAWNSNNLDSKVGGNYNYLYRLFRKSNLKPFERDISTEIYQAGSTPCNGVEGFNCYFPLQSYGFQPTNGVGYQPYRVVVLSFELLHAPATVCGPKKSTPLVKNKCVNFNFNGLTGTGVLTESNKKFLPFQQFGRDIADITDAVRDPQTLEILDITPCSFGGVSVITPGTNTSNQVAVLYQDVNCTEVPVAIHADQLTPTWRVYSTGSNVFQTRAGCLIGAEHVNNSYECDIPIGAGICASYQTQTNSPSRAGSVASQSIIAYTMSLGAENSVAYSNNSIAIPTNFTISVTTEILPVSMTKTSVDCTMYICGDSTECSNLLLQYGSFCTQLNRALTGIAVEQDKNTQEVFAQVKQIYKTPPIKDFGGFNFSQILPDPSKPSKRSFIEDLLFNKVTLADAGFIKQYGDCLGDIAARDLICAQKFNGLTVLPPLLTDEMIAQYTSALLACTITSGWTCGAGPALQIPFAMQMAYRFNGIGVTQNVLYENQKLIANQFNSAIGKIQDSLSSTPSALGKLQDVVNQNAQALNTLVKQLSSNFGAISSVLNDILSRLDPPEAEVQIDRLITGRLQSLQTYVTQQLIRAAEIRASANLAATKMSECVLGQSKRVDFCGKGYHLMSFPQSAPHGVVFLHVTYVPAQEKNFTTAPAICHDGKAHFPREGVFVSNGTHWFVTQRNFYEPQIITTDNTFVSGNCDVVIGIVNNTVYDPLQPELDSFKEELDKYFKNHTSPDVDLGDISGINASVVNIQKEIDRLNEVAKNLNESLIDLQELGKYEQGSGYIPEAPRDGQAYVRKDGEWVLLSTFLGRSLEVLFQGPGSLPETGGGSDYKDDDDKGGGGSGGGGSGGGGSGGGGSGGGGSHHHHHH

SEQ ID NO: 188 - protein, 1297 aa, Artificial Sequence
  source: /note="Description of Artificial Sequence: Synthetic polypeptide"
MFVFLVLLPLVSSQCVNLTTRTQLPPAYTNSFTRGVYYPDKVFRSSVLHSTQDLFLPFFSNVTWFHAIHVSGTNGTKRFDNPVLPFNDGVYFASTEKSNIIRGWIFGTTLDSKTQSLLIVNNATNVVIKVCEFQFCNDPFLGVYYHKNNKSWMESEFRVYSSANNCTFEYVSQPFLMDLEGKQGNFKNLREFVFKNIDGYFKIYSKHTPINLVRDLPQGFSALEPLVDLPIGINITRFQTLLALHRSYLTPGDSSSGWTAGAAAYYVGYLQPRTFLLKYNENGTITDAVDCALDPLSETKCTLKSFTVEKGIYQTSNFRVQPTESIVRFPNITNLCPFGEVFNATRFASVYAWNRKRISNCVADYSVLYNSASFSTFKCYGVSPTKLNDLCFTNVYADSFVIRGDEVRQIAPGQTGKIADYNYKLPDDFTGCVIAWNSNNLDSKVGGNYNYLYRLFRKSNLKPFERDISTEIYQAGSTPCNGVEGFNCYFPLQSYGFQPTNGVGYQPYRVVVLSFELLHAPATVCGPKKSTPLVKNKCVNFNFNGLTGTGVLTESNKKFLPFQQFGRDIADITDAVRDPQTLEILDITPCSFGGVSVITPGTNTSNQVAVLYQDVNCTEVPVAIHADQLTPTWRVYSTGSNVFQTRAGCLIGAEHVNNSYECDIPIGAGICASYQTQTNSPSRAGSVASQSIIAYTMSLGAENSVAYSNNSIAIPTNFTISVTTEILPVSMTKTSVDCTMYICGDSTECSNLLLQYGSFCTQLNRALTGIAVEQDKNTQEVFAQVKQIYKTPPIKDFGGFNFSQILPDPSKPSKRSFIEDLLFNKVTLADAGFIKQYGDCLGDIAARDLICAQKFNGLTVLPPLLTDEMIAQYTSALLAGTITCGWTFGAGPCLQIPFAMQMAYRFNGIGVTQNVLYENQKLIANQFNSAIGKIQDSLSSTPSALGKLQDVVNQNAQALNTLVKQLSSNFGAISSVLNDILSRLDPPEAEVQIDRLITGRLQSLQTYVTQQLIRAAEIRASANLAATKMSECVLGQSKRVDFCGKGYHLMSFPQSAPHGVVFLHVTYVPAQEKNFTTAPAICHDGKAHFPREGVFVSNGTHWFVTQRNFYEPQIITTDNTFVSGNCDVVIGIVNNTVYDPLQPELDSFKEELDKYFKNHTSPDVDLGDISGINASVVNIQKEIDRLNEVAKNLNESLIDLQELGKYEQGSGYIPEAPRDGQAYVRKDGEWVLLSTFLGRSLEVLFQGPGSLPETGGGSDYKDDDDKGGGGSGGGGSGGGGSGGGGSGGGGSHHHHHH

SEQ ID NO: 189 - protein, 1297 aa, Artificial Sequence
  source: /note="Description of Artificial Sequence: Synthetic polypeptide"
MFVFLVLLPLVSSQCVNLTTRTQLPPAYTNSFTRGVYYPDKVFRSSVLHSTQDLFLPFFSNVTWFHAIHVSGTNGTKRFDNPVLPFNDGVYFASTEKSNIIRGWIFGTTLDSKTQSLLIVNNATNVVIKVCEFQFCNDPFLGVYYHKNNKSWMESEFRVYSSANNCTFEYVSQPFLMDLEGKQGNFKNLREFVFKNIDGYFKIYSKHTPINLVRDLPQGFSALEPLVDLPIGINITRFQTLLALHRSYLTPGDSSSGWTAGAAAYYVGYLQPRTFLLKYNENGTITDAVDCALDPLSETKCTLKSFTVEKGIYQTSNFRVQPTESIVRFPNITNLCPFGEVFNATRFASVYAWNRKRISNCVADYSVLYNSASFSTFKCYGVSPTKLNDLCFTNVYADSFVIRGDEVRQIAPGQTGKIADYNYKLPDDFTGCVIAWNSNNLDSKVGGNYNYLYRLFRKSNLKPFERDISTEIYQAGSTPCNGVEGFNCYFPLQSYGFQPTNGVGYQPYRVVVLSFELLHAPATVCGPKKSTPLVKNKCVNFNFNGLTGTGVLTESNKKFLPFQQFGRDIADITDAVRDPQTLEILDITPCSFGGVSVITPGTNTSNQVAVLYQNVNCTEVPVAIHADQLTPTWRVYSTGSNVFQTRAGCLIGAEHVNNSYECDIPIGAGICASYQTQTNSPSRAGSVASQSIIAYTMSLGAENSVAYSNNSIAIPTNFTISVTTEILPVSMTKTSVDCTMYICGDSTECSNLLLQYGSFCTQLNRALTGIAVEQDKNTQEVFAQVKQIYKTPPIKDFGGFNFSQILPDPSKPSKRSFIEDLLFNKVTLADAGFIKQYGDCLGDIAARDLICAQKFNGLTVLPPLLTDEMIAQYTSALLACTITSGWTCGAGAALQIPFAMQMAYRFNGIGVTQNVLYENQKLIANQFNSAIGKIQDSLSSTPSALGKLQDVVNQNAQALNTLVKQLSSNFGAISSVLNDILSRLDPPEAEVQIDRLITGRLQSLQTYVTQQLIRAAEIRASANLAATKMSECVLGQSKRVDFCGKGYHLMSFPQSAPHGVVFLHVTYVPAQEKNFTTAPAICHDGKAHFPREGVFVSNGTHWFVTQRNFYEPQIITTDNTFVSGNCDVVIGIVNNTVYDPLQPELDSFKEELDKYFKNHTSPDVDLGDISGINASVVNIQKEIDRLNEVAKNLNESLIDLQELGKYEQGSGYIPEAPRDGQAYVRKDGEWVLLSTFLGRSLEVLFQGPGSLPETGGGSDYKDDDDKGGGGSGGGGSGGGGSGGGGSGGGGSHHHHHH

SEQ ID NO: 190 - protein, 1297 aa, Artificial Sequence
  source: /note="Description of Artificial Sequence: Synthetic polypeptide"
MFVFLVLLPLVSSQCVNLTTRTQLPPAYTNSFTRGVYYPDKVFRSSVLHSTQDLFLPFFSNVTWFHAIHVSGTNGTKRFDNPVLPFNDGVYFASTEKSNIIRGWIFGTTLDSKTQSLLIVNNATNVVIKVCEFQFCNDPFLGVYYHKNNKSWMESEFRVYSSANNCTFEYVSQPFLMDLEGKQGNFKNLREFVFKNIDGYFKIYSKHTPINLVRDLPQGFSALEPLVDLPIGINITRFQTLLALHRSYLTPGDSSSGWTAGAAAYYVGYLQPRTFLLKYNENGTITDAVDCALDPLSETKCTLKSFTVEKGIYQTSNFRVQPTESIVRFPNITNLCPFGEVFNATRFASVYAWNRKRISNCVADYSVLYNSASFSTFKCYGVSPTKLNDLCFTNVYADSFVIRGDEVRQIAPGQTGKIADYNYKLPDDFTGCVIAWNSNNLDSKVGGNYNYLYRLFRKSNLKPFERDISTEIYQAGSTPCNGVEGFNCYFPLQSYGFQPTNGVGYQPYRVVVLSFELLHAPATVCGPKKSTPLVKNKCVNFNFNGLTGTGVLTESNKKFLPFQQFGRDIADITDAVRDPQTLEILDITPCSFGGVSVITPGTNTSNQVAVLYQNVNCTEVPVAIHADQLTPTWRVYSTGSNVFQTRAGCLIGAEHVNNSYECDIPIGAGICASYQTQTNSPSRAGSVASQSIIAYTMSLGAENSVAYSNNSIAIPTNFTISVTTEILPVSMTKTSVDCTMYICGDSTECSNLLLQYGSFCTQLNRALTGIAVEQDKNTQEVFAQVKQIYKTPPIKDFGGFNFSQILPDPSKPSKRSFIEDLLFNKVTLADAGFIKQYGDCLGDIAARDLICAQKFNGLTVLPPLLTDEMIAQYTSALLAGTITCGWTFGAGACLQIPFAMQMAYRFNGIGVTQNVLYENQKLIANQFNSAIGKIQDSLSSTPSALGKLQDVVNQNAQALNTLVKQLSSNFGAISSVLNDILSRLDPPEAEVQIDRLITGRLQSLQTYVTQQLIRAAEIRASANLAATKMSECVLGQSKRVDFCGKGYHLMSFPQSAPHGVVFLHVTYVPAQEKNFTTAPAICHDGKAHFPREGVFVSNGTHWFVTQRNFYEPQIITTDNTFVSGNCDVVIGIVNNTVYDPLQPELDSFKEELDKYFKNHTSPDVDLGDISGINASVVNIQKEIDRLNEVAKNLNESLIDLQELGKYEQGSGYIPEAPRDGQAYVRKDGEWVLLSTFLGRSLEVLFQGPGSLPETGGGSDYKDDDDKGGGGSGGGGSGGGGSGGGGSGGGGSHHHHHH

SEQ ID NO: 191 - protein, 1297 aa, Artificial Sequence
  source: /note="Description of Artificial Sequence: Synthetic polypeptide"
MFVFLVLLPLVSSQCVNLTTRTQLPPAYTNSFTRGVYYPDKVFRSSVLHSTQDLFLPFFSNVTWFHAIHVSGTNGTKRFDNPVLPFNDGVYFASTEKSNIIRGWIFGTTLDSKTQSLLIVNNATNVVIKVCEFQFCNDPFLGVYYHKNNKSWMESEFRVYSSANNCTFEYVSQPFLMDLEGKQGNFKNLREFVFKNIDGYFKIYSKHTPINLVRDLPQGFSALEPLVDLPIGINITRFQTLLALHRSYLTPGDSSSGWTAGAAAYYVGYLQPRTFLLKYNENGTITDAVDCALDPLSETKCTLKSFTVEKGIYQTSNFRVQPTESIVRFPNITNLCPFGEVFNATRFASVYAWNRKRISNCVADYSVLYNSASFSTFKCYGVSPTKLNDLCFTNVYADSFVIRGDEVRQIAPGQTGKIADYNYKLPDDFTGCVIAWNSNNLDSKVGGNYNYLYRLFRKSNLKPFERDISTEIYQAGSTPCNGVEGFNCYFPLQSYGFQPTNGVGYQPYRVVVLSFELLHAPATVCGPKKSTPLVKNKCVNFNFNGLTGTGVLTESNKKFLPFQQFGRDIADITDAVRDPQTLEILDITPCSFGGVSVITPGTNTSNQVAVLYQNVNCTEVPVAIHADQLTPTWRVYSTGSNVFQTRAGCLIGAEHVNNSYECDIPIGAGICASYQTQTNSPSRAGSVASQSIIAYTMSLGAENSVAYSNNSIAIPTNFTISVTTEILPVSMTKTSVDCTMYICGDSTECSNLLLQYGSFCTQLNRALTGIAVEQDKNTQEVFAQVKQIYKTPPIKDFGGFNFSQILPDPSKPSKRSFIEDLLFNKVTLADAGFIKQYGDCLGDIAARDLICAQKFNGLTVLPPLLTDEMIAQYTSALLACTITSGWTCGAGPALQIPFAMQMAYRFNGIGVTQNVLYENQKLIANQFNSAIGKIQDSLSSTASALGKLQDVVNQNAQALNTLVKQLSSNFGAISSVLNDILSRLDPPEAEVQIDRLITGRLQSLQTYVTQQLIRAAEIRASANLAATKMSECVLGQSKRVDFCGKGYHLMSFPQSAPHGVVFLHVTYVPAQEKNFTTAPAICHDGKAHFPREGVFVSNGTHWFVTQRNFYEPQIITTDNTFVSGNCDVVIGIVNNTVYDPLQPELDSFKEELDKYFKNHTSPDVDLGDISGINASVVNIQKEIDRLNEVAKNLNESLIDLQELGKYEQGSGYIPEAPRDGQAYVRKDGEWVLLSTFLGRSLEVLFQGPGSLPETGGGSDYKDDDDKGGGGSGGGGSGGGGSGGGGSGGGGSHHHHHH

SEQ ID NO: 192 - protein, 1297 aa, Artificial Sequence
  source: /note="Description of Artificial Sequence: Synthetic polypeptide"
MFVFLVLLPLVSSQCVNLTTRTQLPPAYTNSFTRGVYYPDKVFRSSVLHSTQDLFLPFFSNVTWFHAIHVSGTNGTKRFDNPVLPFNDGVYFASTEKSNIIRGWIFGTTLDSKTQSLLIVNNATNVVIKVCEFQFCNDPFLGVYYHKNNKSWMESEFRVYSSANNCTFEYVSQPFLMDLEGKQGNFKNLREFVFKNIDGYFKIYSKHTPINLVRDLPQGFSALEPLVDLPIGINITRFQTLLALHRSYLTPGDSSSGWTAGAAAYYVGYLQPRTFLLKYNENGTITDAVDCALDPLSETKCTLKSFTVEKGIYQTSNFRVQPTESIVRFPNITNLCPFGEVFNATRFASVYAWNRKRISNCVADYSVLYNSASFSTFKCYGVSPTKLNDLCFTNVYADSFVIRGDEVRQIAPGQTGKIADYNYKLPDDFTGCVIAWNSNNLDSKVGGNYNYLYRLFRKSNLKPFERDISTEIYQAGSTPCNGVEGFNCYFPLQSYGFQPTNGVGYQPYRVVVLSFELLHAPATVCGPKKSTPLVKNKCVNFNFNGLTGTGVLTESNKKFLPFQQFGRDIADITDAVRDPQTLEILDITPCSFGGVSVITPGTNTSNQVAVLYQNVNCTEVPVAIHADQLTPTWRVYSTGSNVFQTRAGCLIGAEHVNNSYECDIPIGAGICASYQTQTNSPSRAGSVASQSIIAYTMSLGAENSVAYSNNSIAIPTNFTISVTTEILPVSMTKTSVDCTMYICGDSTECSNLLLQYGSFCTQLNRALTGIAVEQDKNTQEVFAQVKQIYKTPPIKDFGGFNFSQILPDPSKPSKRSFIEDLLFNKVTLADAGFIKQYGDCLGDIAARDLICAQKFNGLTVLPPLLTDEMIAQYTSALLAGTITCGWTFGAGPCLQIPFAMQMAYRFNGIGVTQNVLYENQKLIANQFNSAIGKIQDSLSSTASALGKLQDVVNQNAQALNTLVKQLSSNFGAISSVLNDILSRLDPPEAEVQIDRLITGRLQSLQTYVTQQLIRAAEIRASANLAATKMSECVLGQSKRVDFCGKGYHLMSFPQSAPHGVVFLHVTYVPAQEKNFTTAPAICHDGKAHFPREGVFVSNGTHWFVTQRNFYEPQIITTDNTFVSGNCDVVIGIVNNTVYDPLQPELDSFKEELDKYFKNHTSPDVDLGDISGINASVVNIQKEIDRLNEVAKNLNESLIDLQELGKYEQGSGYIPEAPRDGQAYVRKDGEWVLLSTFLGRSLEVLFQGPGSLPETGGGSDYKDDDDKGGGGSGGGGSGGGGSGGGGSGGGGSHHHHHH

SEQ ID NO: 193 - protein, 1297 aa, Artificial Sequence
  source: /note="Description of Artificial Sequence: Synthetic polypeptide"
MFVFLVLLPLVSSQCVNLTTRTQLPPAYTNSFTRGVYYPDKVFRSSVLHSTQDLFLPFFSNVTWFHAIHVSGTNGTKRFDNPVLPFNDGVYFASTEKSNIIRGWIFGTTLDSKTQSLLIVNNATNVVIKVCEFQFCNDPFLGVYYHKNNKSWMESEFRVYSSANNCTFEYVSQPFLMDLEGKQGNFKNLREFVFKNIDGYFKIYSKHTPINLVRDLPQGFSALEPLVDLPIGINITRFQTLLALHRSYLTPGDSSSGWTAGAAAYYVGYLQPRTFLLKYNENGTITDAVDCALDPLSETKCTLKSFTVEKGIYQTSNFRVQPTESIVRFPNITNLCPFGEVFNATRFASVYAWNRKRISNCVADYSVLYNSASFSTFKCYGVSPTKLNDLCFTNVYADSFVIRGDEVRQIAPGQTGKIADYNYKLPDDFTGCVIAWNSNNLDSKVGGNYNYLYRLFRKSNLKPFERDISTEIYQAGSTPCNGVEGFNCYFPLQSYGFQPTNGVGYQPYRVVVLSFELLHAPATVCGPKKSTPLVKNKCVNFNFNGLTGTGVLTESNKKFLPFQQFGRDIADITDAVRDPQTLEILDITPCSFGGVSVITPGTNTSNQVAVLYQNVNCTEVPVAIHADQLTPTWRVYSTGSNVFQTRAGCLIGAEHVNNSYECDIPIGAGICASYQTQTNSPSRAGSVASQSIIAYTMSLGAENSVAYSNNSIAIPTNFTISVTTEILPVSMTKTSVDCTMYICGDSTECSNLLLQYGSFCTQLNRALTGIAVEQDKNTQEVFAQVKQIYKTPPIKDFGGFNFSQILPDPSKPSKRSFIEDLLFNKVTLADAGFIKQYGDCLGDIAARDLICAQKFNGLTVLPPLLTDEMIAQYTSALLACTITSGWTCGAGPALQIPFAMQMAYRFNGIGVTQNVLYENQKLIANQFNSAIGKIQDSLSSTPSALGKLQDVVNQNAQALNTLVKQLSSNFGAISSVLNDILSRLDPPEAEVQIDRLITGRLQSLQTYVTQQLIRAAEIRASANLAATKMSECVLGQSKRVDFCGKGYHLMSFPQSAPHGVVFLHVTYVPAQEKNFTTAPAICHDGKAHFPREGVFVSNGTHWFVTQRNFYEPQIITTDNTFVSGNCDVVIGIVNNTVYDPLQPELDSFKEELDKYFKNHTSPDVDLGDISGINASVVNIQKEIDRLNEVAKNLNESLIDLQELGKYEQGSGYIPEAPRDGQAYVRKDGEWVLLSTFLGRSLEVLFQGPGSLPETGGGSDYKDDDDKGGGGSGGGGSGGGGSGGGGSGGGGSHHHHHH

SEQ ID NO: 194 - protein, 1297 aa, Artificial Sequence
  source: /note="Description of Artificial Sequence: Synthetic polypeptide"
MFVFLVLLPLVSSQCVNLTTRTQLPPAYTNSFTRGVYYPDKVFRSSVLHSTQDLFLPFFSNVTWFHAIHVSGTNGTKRFDNPVLPFNDGVYFASTEKSNIIRGWIFGTTLDSKTQSLLIVNNATNVVIKVCEFQFCNDPFLGVYYHKNNKSWMESEFRVYSSANNCTFEYVSQPFLMDLEGKQGNFKNLREFVFKNIDGYFKIYSKHTPINLVRDLPQGFSALEPLVDLPIGINITRFQTLLALHRSYLTPGDSSSGWTAGAAAYYVGYLQPRTFLLKYNENGTITDAVDCALDPLSETKCTLKSFTVEKGIYQTSNFRVQPTESIVRFPNITNLCPFGEVFNATRFASVYAWNRKRISNCVADYSVLYNSASFSTFKCYGVSPTKLNDLCFTNVYADSFVIRGDEVRQIAPGQTGKIADYNYKLPDDFTGCVIAWNSNNLDSKVGGNYNYLYRLFRKSNLKPFERDISTEIYQAGSTPCNGVEGFNCYFPLQSYGFQPTNGVGYQPYRVVVLSFELLHAPATVCGPKKSTPLVKNKCVNFNFNGLTGTGVLTESNKKFLPFQQFGRDIADITDAVRDPQTLEILDITPCSFGGVSVITPGTNTSNQVAVLYQNVNCTEVPVAIHADQLTPTWRVYSTGSNVFQTRAGCLIGAEHVNNSYECDIPIGAGICASYQTQTNSPSRAGSVASQSIIAYTMSLGAENSVAYSNNSIAIPTNFTISVTTEILPVSMTKTSVDCTMYICGDSTECSNLLLQYGSFCTQLNRALTGIAVEQDKNTQEVFAQVKQIYKTPPIKDFGGFNFSQILPDPSKPSKRSFIEDLLFNKVTLADAGFIKQYGDCLGDIAARDLICAQKFNGLTVLPPLLTDEMIAQYTSALLAGTITCGWTFGAGPCLQIPFAMQMAYRFNGIGVTQNVLYENQKLIANQFNSAIGKIQDSLSSTPSALGKLQDVVNQNAQALNTLVKQLSSNFGAISSVLNDILSRLDPPEAEVQIDRLITGRLQSLQTYVTQQLIRAAEIRASANLAATKMSECVLGQSKRVDFCGKGYHLMSFPQSAPHGVVFLHVTYVPAQEKNFTTAPAICHDGKAHFPREGVFVSNGTHWFVTQRNFYEPQIITTDNTFVSGNCDVVIGIVNNTVYDPLQPELDSFKEELDKYFKNHTSPDVDLGDISGINASVVNIQKEIDRLNEVAKNLNESLIDLQELGKYEQGSGYIPEAPRDGQAYVRKDGEWVLLSTFLGRSLEVLFQGPGSLPETGGGSDYKDDDDKGGGGSGGGGSGGGGSGGGGSGGGGSHHHHHH

SEQ ID NO: 195 - protein, 1273 aa, Artificial Sequence
  source: /note="Description of Artificial Sequence: Synthetic polypeptide"
MFVFLVLLPLVSSQCVNLTTRTQLPPAYTNSFTRGVYYPDKVFRSSVLHSTQDLFLPFFSNVTWFHAIHVSGTNGTKRFDNPVLPFNDGVYFASTEKSNIIRGWIFGTTLDSKTQSLLIVNNATNVVIKVCEFQFCNDPFLGVYYHKNNKSWMESEFRVYSSANNCTFEYVSQPFLMDLEGKQGNFKNLREFVFKNIDGYFKIYSKHTPINLVRDLPQGFSALEPLVDLPIGINITRFQTLLALHRSYLTPGDSSSGWTAGAAAYYVGYLQPRTFLLKYNENGTITDAVDCALDPLSETKCTLKSFTVEKGIYQTSNFRVQPTESIVRFPNITNLCPFGEVFNATRFASVYAWNRKRISNCVADYSVLYNSASFSTFKCYGVSPTKLNDLCFTNVYADSFVIRGDEVRQIAPGQTGKIADYNYKLPDDFTGCVIAWNSNNLDSKVGGNYNYLYRLFRKSNLKPFERDISTEIYQAGSTPCNGVEGFNCYFPLQSYGFQPTNGVGYQPYRVVVLSFELLHAPATVCGPKKSTNLVKNKCVNFNFNGLTGTGVLTESNKKFLPFQQFGRDIADTTDAVRDPQTLEILDITPCSFGGVSVITPGTNTSNQVAVLYQDVNCTEVPVAIHADQLTPTWRVYSTGSNVFQTRAGCLIGAEHVNNSYECDIPIGAGICASYQTQTNSPRRARSVASQSIIAYTMSLGAENSVAYSNNSIAIPTNFTISVTTEILPVSMTKTSVDCTMYICGDSTECSNLLLQYGSFCTQLNRALTGIAVEQDKNTQEVFAQVKQIYKTPPIKDFGGFNFSQILPDPSKPSKRSFIEDLLFNKVTLADAGFIKQYGDCLGDIAARDLICAQKFNGLTVLPPLLTDEMIAQYTSALLAGTITSGWTFGAGAALQIPFAMQMAYRFNGIGVTQNVLYENQKLIANQFNSAIGKIQDSLSSTASALGKLQDVVNQNAQALNTLVKQLSSNFGAISSVLNDILSRLDPPEAEVQIDRLITGRLQSLQTYVTQQLIRAAEIRASANLAATKMSECVLGQSKRVDFCGKGYHLMSFPQSAPHGVVFLHVTYVPAQEKNFTTAPAICHDGKAHFPREGVFVSNGTHWFVTQRNFYEPQIITTDNTFVSGNCDVVIGIVNNTVYDPLQPELDSFKEELDKYFKNHTSPDVDLGDISGINASVVNIQKEIDRLNEVAKNLNESLIDLQELGKYEQYIKWPWYIWLGFIAGLIAIVMVTIMLCCMTSCCSCLKGCCSCGSCCKFDEDDSEPVLKGVKLHYT

SEQ ID NO: 196 - protein, 1273 aa, Artificial Sequence
  source: /note="Description of Artificial Sequence: Synthetic polypeptide"
MFVFLVLLPLVSSQCVNLTTRTQLPPAYTNSFTRGVYYPDKVFRSSVLHSTQDLFLPFFSNVTWFHAIHVSGTNGTKRFDNPVLPFNDGVYFASTEKSNIIRGWIFGTTLDSKTQSLLIVNNATNVVIKVCEFQFCNDPFLGVYYHKNNKSWMESEFRVYSSANNCTFEYVSQPFLMDLEGKQGNFKNLREFVFKNIDGYFKIYSKHTPINLVRDLPQGFSALEPLVDLPIGINITRFQTLLALHRSYLTPGDSSSGWTAGAAAYYVGYLQPRTFLLKYNENGTITDAVDCALDPLSETKCTLKSFTVEKGIYQTSNFRVQPTESIVRFPNITNLCPFGEVFNATRFASVYAWNRKRISNCVADYSVLYNSASFSTFKCYGVSPTKLNDLCFTNVYADSFVIRGDEVRQIAPGQTGKIADYNYKLPDDFTGCVIAWNSNNLDSKVGGNYNYLYRLFRKSNLKPFERDISTEIYQAGSTPCNGVEGFNCYFPLQSYGFQPTNGVGYQPYRVVVLSFELLHAPATVCGPKKSTNLVKNKCVNFNFNGLTGTGVLTESNKKFLPFQQFGRDIADTTDAVRDPQTLEILDITPCSFGGVSVITPGTNTSNQVAVLYQDVNCTEVPVAIHADQLTPTWRVYSTGSNVFQTRAGCLIGAEHVNNSYECDIPIGAGICASYQTQTNSPSRAGSVASQSIIAYTMSLGAENSVAYSNNSIAIPTNFTISVTTEILPVSMTKTSVDCTMYICGDSTECSNLLLQYGSFCTQLNRALTGIAVEQDKNTQEVFAQVKQIYKTPPIKDFGGFNFSQILPDPSKPSKRSFIEDLLFNKVTLADAGFIKQYGDCLGDIAARDLICAQKFNGLTVLPPLLTDEMIAQYTSALLAGTITSGWTFGAGAALQIPFAMQMAYRFNGIGVTQNVLYENQKLIANQFNSAIGKIQDSLSSTASALGKLQDVVNQNAQALNTLVKQLSSNFGAISSVLNDILSRLDKVEAEVQIDRLITGRLQSLQTYVTQQLIRAAEIRASANLAATKMSECVLGQSKRVDFCGKGYHLMSFPQSAPHGVVFLHVTYVPAQEKNFTTAPAICHDGKAHFPREGVFVSNGTHWFVTQRNFYEPQIITTDNTFVSGNCDVVIGIVNNTVYDPLQPELDSFKEELDKYFKNHTSPDVDLGDISGINASVVNIQKEIDRLNEVAKNLNESLIDLQELGKYEQYIKWPWYIWLGFIAGLIAIVMVTIMLCCMTSCCSCLKGCCSCGSCCKFDEDDSEPVLKGVKLHYT

SEQ ID NO: 197 - protein, 1273 aa, Artificial Sequence
  source: /note="Description of Artificial Sequence: Synthetic polypeptide"
MFVFLVLLPLVSSQCVNLTTRTQLPPAYTNSFTRGVYYPDKVFRSSVLHSTQDLFLPFFSNVTWFHAIHVSGTNGTKRFDNPVLPFNDGVYFASTEKSNIIRGWIFGTTLDSKTQSLLIVNNATNVVIKVCEFQFCNDPFLGVYYHKNNKSWMESEFRVYSSANNCTFEYVSQPFLMDLEGKQGNFKNLREFVFKNIDGYFKIYSKHTPINLVRDLPQGFSALEPLVDLPIGINITRFQTLLALHRSYLTPGDSSSGWTAGAAAYYVGYLQPRTFLLKYNENGTITDAVDCALDPLSETKCTLKSFTVEKGIYQTSNFRVQPTESIVRFPNITNLCPFGEVFNATRFASVYAWNRKRISNCVADYSVLYNSASFSTFKCYGVSPTKLNDLCFTNVYADSFVIRGDEVRQIAPGQTGKIADYNYKLPDDFTGCVIAWNSNNLDSKVGGNYNYLYRLFRKSNLKPFERDISTEIYQAGSTPCNGVEGFNCYFPLQSYGFQPTNGVGYQPYRVVVLSFELLHAPATVCGPKKSTNLVKNKCVNFNFNGLTGTGVLTESNKKFLPFQQFGRDIADTTDAVRDPQTLEILDITPCSFGGVSVITPGTNTSNQVAVLYQNVNCTEVPVAIHADQLTPTWRVYSTGSNVFQTRAGCLIGAEHVNNSYECDIPIGAGICASYQTQTNSPSRAGSVASQSIIAYTMSLGAENSVAYSNNSIAIPTNFTISVTTEILPVSMTKTSVDCTMYICGDSTECSNLLLQYGSFCTQLNRALTGIAVEQDKNTQEVFAQVKQIYKTPPIKDFGGFNFSQILPDPSKPSKRSFIEDLLFNKVTLADAGFIKQYGDCLGDIAARDLICAQKFNGLTVLPPLLTDEMIAQYTSALLAGTITSGWTFGAGPALQIPFAMQMAYRFNGIGVTQNVLYENQKLIANQFNSAIGKIQDSLSSTPSALGKLQDVVNQNAQALNTLVKQLSSNFGAISSVLNDILSRLDKVEAEVQIDRLITGRLQSLQTYVTQQLIRAAEIRASANLAATKMSECVLGQSKRVDFCGKGYHLMSFPQSAPHGVVFLHVTYVPAQEKNFTTAPAICHDGKAHFPREGVFVSNGTHWFVTQRNFYEPQIITTDNTFVSGNCDVVIGIVNNTVYDPLQPELDSFKEELDKYFKNHTSPDVDLGDISGINASVVNIQKEIDRLNEVAKNLNESLIDLQELGKYEQYIKWPWYIWLGFIAGLIAIVMVTIMLCCMTSCCSCLKGCCSCGSCCKFDEDDSEPVLKGVKLHYT

SEQ ID NO: 198 - protein, 1273 aa, Artificial Sequence
  source: /note="Description of Artificial Sequence: Synthetic polypeptide"
MFVFLVLLPLVSSQCVNLTTRTQLPPAYTNSFTRGVYYPDKVFRSSVLHSTQDLFLPFFSNVTWFHAIHVSGTNGTKRFDNPVLPFNDGVYFASTEKSNIIRGWIFGTTLDSKTQSLLIVNNATNVVIKVCEFQFCNDPFLGVYYHKNNKSWMESEFRVYSSANNCTFEYVSQPFLMDLEGKQGNFKNLREFVFKNIDGYFKIYSKHTPINLVRDLPQGFSALEPLVDLPIGINITRFQTLLALHRSYLTPGDSSSGWTAGAAAYYVGYLQPRTFLLKYNENGTITDAVDCALDPLSETKCTLKSFTVEKGIYQTSNFRVQPTESIVRFPNITNLCPFGEVFNATRFASVYAWNRKRISNCVADYSVLYNSASFSTFKCYGVSPTKLNDLCFTNVYADSFVIRGDEVRQIAPGQTGKIADYNYKLPDDFTGCVIAWNSNNLDSKVGGNYNYLYRLFRKSNLKPFERDISTEIYQAGSTPCNGVEGFNCYFPLQSYGFQPTNGVGYQPYRVVVLSFELLHAPATVCGPKKSTNLVKNKCVNFNFNGLTGTGVLTESNKKFLPFQQFGRDIADTTDAVRDPQTLEILDITPCSFGGVSVITPGTNTSNQVAVLYQNVNCTEVPVAIHADQLTPTWRVYSTGSNVFQTRAGCLIGAEHVNNSYECDIPIGAGICASYQTQTNSPSRAGSVASQSIIAYTMSLGAENSVAYSNNSIAIPTNFTISVTTEILPVSMTKTSVDCTMYICGDSTECSNLLLQYGSFCTQLNRALTGIAVEQDKNTQEVFAQVKQIYKTPPIKDFGGFNFSQILPDPSKPSKRSFIEDLLFNKVTLADAGFIKQYGDCLGDIAARDLICAQKFNGLTVLPPLLTDEMIAQYTSALLAGTITSGWTFGAGPALQIPFAMQMAYRFNGIGVTQNVLYENQKLIANQFNSAIGKIQDSLSSPPSALGKLQDVVNQNAQALNTLVKQLSSNFGAISSVLNDILSRLDKVEAEVQIDRLITGRLQSLQTYVTQQLIRAAEIRASANLAATKMSECVLGQSKRVDFCGKGYHLMSFPQSAPHGVVFLHVTYVPAQEKNFTTAPAICHDGKAHFPREGVFVSNGTHWFVTQRNFYEPQIITTDNTFVSGNCDVVIGIVNNTVYDPLQPELDSFKEELDKYFKNHTSPDVDLGDISGINASVVNIQKEIDRLNEVAKNLNESLIDLQELGKYEQYIKWPWYIWLGFIAGLIAIVMVTIMLCCMTSCCSCLKGCCSCGSCCKFDEDDSEPVLKGVKLHYT

SEQ ID NO: 199 - protein, 1273 aa, Artificial Sequence
  source: /note="Description of Artificial Sequence: Synthetic polypeptide"
MFVFLVLLPLVSSQCVNLTTRTQLPPAYTNSFTRGVYYPDKVFRSSVLHSTQDLFLPFFSNVTWFHAIHVSGTNGTKRFDNPVLPFNDGVYFASTEKSNIIRGWIFGTTLDSKTQSLLIVNNATNVVIKVCEFQFCNDPFLGVYYHKNNKSWMESEFRVYSSANNCTFEYVSQPFLMDLEGKQGNFKNLREFVFKNIDGYFKIYSKHTPINLVRDLPQGFSALEPLVDLPIGINITRFQTLLALHRSYLTPGDSSSGWTAGAAAYYVGYLQPRTFLLKYNENGTITDAVDCALDPLSETKCTLKSFTVEKGIYQTSNFRVQPTESIVRFPNITNLCPFGEVFNATRFASVYAWNRKRISNCVADYSVLYNSASFSTFKCYGVSPTKLNDLCFTNVYADSFVIRGDEVRQIAPGQTGKIADYNYKLPDDFTGCVIAWNSNNLDSKVGGNYNYLYRLFRKSNLKPFERDISTEIYQAGSTPCNGVEGFNCYFPLQSYGFQPTNGVGYQPYRVVVLSFELLHAPATVCGPKKSTNLVKNKCVNFNFNGLTGTGVLTESNKKFLPFQQFGRDIADTTDAVRDPQTLEILDITPCSFGGVSVITPGTNTSNQVAVLYQNVNCTEVPVAIHADQLTPTWRVYSTGSNVFQTRAGCLIGAEHVNNSYECDIPIGAGICASYQTQTNSPSRAGSVASQSIIAYTMSLGAENSVAYSNNSIAIPTNFTISVTTEILPVSMTKTSVDCTMYICGDSTECSNLLLQYGSFCTQLNRALTGIAVEQDKNTQEVFAQVKQIYKTPPIKDFGGFNFSQILPDPSKPSKRSFIEDLLFNKVTLADAGFIKQYGDCLGDIAARDLICAQKFNGLTVLPPLLTDEMIAQYTSALLAGTITSGWTFGAGPALQIPFAMQMAYRFNGIGVTQNVLYENQKLIANQFNSAIGKIQDSLSSTPSPLGKLQDVVNQNAQALNTLVKQLSSNFGAISSVLNDILSRLDKVEAEVQIDRLITGRLQSLQTYVTQQLIRAAEIRASANLAATKMSECVLGQSKRVDFCGKGYHLMSFPQSAPHGVVFLHVTYVPAQEKNFTTAPAICHDGKAHFPREGVFVSNGTHWFVTQRNFYEPQIITTDNTFVSGNCDVVIGIVNNTVYDPLQPELDSFKEELDKYFKNHTSPDVDLGDISGINASVVNIQKEIDRLNEVAKNLNESLIDLQELGKYEQYIKWPWYIWLGFIAGLIAIVMVTIMLCCMTSCCSCLKGCCSCGSCCKFDEDDSEPVLKGVKLHYT

SEQ ID NO: 200 - protein, 1273 aa, Artificial Sequence
  source: /note="Description of Artificial Sequence: Synthetic polypeptide"
MFVFLVLLPLVSSQCVNLTTRTQLPPAYTNSFTRGVYYPDKVFRSSVLHSTQDLFLPFFSNVTWFHAIHVSGTNGTKRFDNPVLPFNDGVYFASTEKSNIIRGWIFGTTLDSKTQSLLIVNNATNVVIKVCEFQFCNDPFLGVYYHKNNKSWMESEFRVYSSANNCTFEYVSQPFLMDLEGKQGNFKNLREFVFKNIDGYFKIYSKHTPINLVRDLPQGFSALEPLVDLPIGINITRFQTLLALHRSYLTPGDSSSGWTAGAAAYYVGYLQPRTFLLKYNENGTITDAVDCALDPLSETKCTLKSFTVEKGIYQTSNFRVQPTESIVRFPNITNLCPFGEVFNATRFASVYAWNRKRISNCVADYSVLYNSASFSTFKCYGVSPTKLNDLCFTNVYADSFVIRGDEVRQIAPGQTGKIADYNYKLPDDFTGCVIAWNSNNLDSKVGGNYNYLYRLFRKSNLKPFERDISTEIYQAGSTPCNGVEGFNCYFPLQSYGFQPTNGVGYQPYRVVVLSFELLHAPATVCGPKKSTNLVKNKCVNFNFNGLTGTGVLTESNKKFLPFQQFGRDIADTTDAVRDPQTLEILDITPCSFGGVSVITPGTNTSNQVAVLYQNVNCTEVPVAIHADQLTPTWRVYSTGSNVFQTRAGCLIGAEHVNNSYECDIPIGAGICASYQTQTNSPSRAGSVASQSIIAYTMSLGAENSVAYSNNSIAIPTNFTISVTTEILPVSMTKTSVDCTMYICGDSTECSNLLLQYGSFCTQLNRALTGIAVEQDKNTQEVFAQVKQIYKTPPIKDFGGFNFSQILPDPSKPSKRSFIEDLLFNKVTLADAGFIKQYGDCLGDIAARDLICAQKFNGLTVLPPLLTDEMIAQYTSALLAGTITSGWTFGAGPALQIPFAMQMAYRFNGIGVTQNVLYENQKLIANQFNSAIGKIQDSLSSPASALGKLQDVVNQNAQALNTLVKQLSSNFGAISSVLNDILSRLDKVEAEVQIDRLITGRLQSLQTYVTQQLIRAAEIRASANLAATKMSECVLGQSKRVDFCGKGYHLMSFPQSAPHGVVFLHVTYVPAQEKNFTTAPAICHDGKAHFPREGVFVSNGTHWFVTQRNFYEPQIITTDNTFVSGNCDVVIGIVNNTVYDPLQPELDSFKEELDKYFKNHTSPDVDLGDISGINASVVNIQKEIDRLNEVAKNLNESLIDLQELGKYEQYIKWPWYIWLGFIAGLIAIVMVTIMLCCMTSCCSCLKGCCSCGSCCKFDEDDSEPVLKGVKLHYT

SEQ ID NO: 201 - protein, 1273 aa, Artificial Sequence
  source: /note="Description of Artificial Sequence: Synthetic polypeptide"
MFVFLVLLPLVSSQCVNLTTRTQLPPAYTNSFTRGVYYPDKVFRSSVLHSTQDLFLPFFSNVTWFHAIHVSGTNGTKRFDNPVLPFNDGVYFASTEKSNIIRGWIFGTTLDSKTQSLLIVNNATNVVIKVCEFQFCNDPFLGVYYHKNNKSWMESEFRVYSSANNCTFEYVSQPFLMDLEGKQGNFKNLREFVFKNIDGYFKIYSKHTPINLVRDLPQGFSALEPLVDLPIGINITRFQTLLALHRSYLTPGDSSSGWTAGAAAYYVGYLQPRTFLLKYNENGTITDAVDCALDPLSETKCTLKSFTVEKGIYQTSNFRVQPTESIVRFPNITNLCPFGEVFNATRFASVYAWNRKRISNCVADYSVLYNSASFSTFKCYGVSPTKLNDLCFTNVYADSFVIRGDEVRQIAPGQTGKIADYNYKLPDDFTGCVIAWNSNNLDSKVGGNYNYLYRLFRKSNLKPFERDISTEIYQAGSTPCNGVEGFNCYFPLQSYGFQPTNGVGYQPYRVVVLSFELLHAPATVCGPKKSTNLVKNKCVNFNFNGLTGTGVLTESNKKFLPFQQFGRDIADTTDAVRDPQTLEILDITPCSFGGVSVITPGTNTSNQVAVLYQNVNCTEVPVAIHADQLTPTWRVYSTGSNVFQTRAGCLIGAEHVNNSYECDIPIGAGICASYQTQTNSPSRAGSVASQSIIAYTMSLGAENSVAYSNNSIAIPTNFTISVTTEILPVSMTKTSVDCTMYICGDSTECSNLLLQYGSFCTQLNRALTGIAVEQDKNTQEVFAQVKQIYKTPPIKDFGGFNFSQILPDPSKPSKRSFIEDLLFNKVTLADAGFIKQYGDCLGDIAARDLICAQKFNGLTVLPPLLTDEMIAQYTSALLAGTITSGWTFGAGPALQIPFAMQMAYRFNGIGVTQNVLYENQKLIANQFNSAIGKIQDSLSSTASPLGKLQDVVNQNAQALNTLVKQLSSNFGAISSVLNDILSRLDKVEAEVQIDRLITGRLQSLQTYVTQQLIRAAEIRASANLAATKMSECVLGQSKRVDFCGKGYHLMSFPQSAPHGVVFLHVTYVPAQEKNFTTAPAICHDGKAHFPREGVFVSNGTHWFVTQRNFYEPQIITTDNTFVSGNCDVVIGIVNNTVYDPLQPELDSFKEELDKYFKNHTSPDVDLGDISGINASVVNIQKEIDRLNEVAKNLNESLIDLQELGKYEQYIKWPWYIWLGFIAGLIAIVMVTIMLCCMTSCCSCLKGCCSCGSCCKFDEDDSEPVLKGVKLHYT

SEQ ID NO: 202 - protein, 1273 aa, Artificial Sequence
  source: /note="Description of Artificial Sequence: Synthetic polypeptide"
MFVFLVLLPLVSSQCVNLTTRTQLPPAYTNSFTRGVYYPDKVFRSSVLHSTQDLFLPFFSNVTWFHAIHVSGTNGTKRFDNPVLPFNDGVYFASTEKSNIIRGWIFGTTLDSKTQSLLIVNNATNVVIKVCEFQFCNDPFLGVYYHKNNKSWMESEFRVYSSANNCTFEYVSQPFLMDLEGKQGNFKNLREFVFKNIDGYFKIYSKHTPINLVRDLPQGFSALEPLVDLPIGINITRFQTLLALHRSYLTPGDSSSGWTAGAAAYYVGYLQPRTFLLKYNENGTITDAVDCALDPLSETKCTLKSFTVEKGIYQTSNFRVQPTESIVRFPNITNLCPFGEVFNATRFASVYAWNRKRISNCVADYSVLYNSASFSTFKCYGVSPTKLNDLCFTNVYADSFVIRGDEVRQIAPGQTGKIADYNYKLPDDFTGCVIAWNSNNLDSKVGGNYNYLYRLFRKSNLKPFERDISTEIYQAGSTPCNGVEGFNCYFPLQSYGFQPTNGVGYQPYRVVVLSFELLHAPATVCGPKKSTNLVKNKCVNFNFNGLTGTGVLTESNKKFLPFQQFGRDIADTTDAVRDPQTLEILDITPCSFGGVSVITPGTNTSNQVAVLYQNVNCTEVPVAIHADQLTPTWRVYSTGSNVFQTRAGCLIGAEHVNNSYECDIPIGAGICASYQTQTNSPSRAGSVASQSIIAYTMSLGAENSVAYSNNSIAIPTNFTISVTTEILPVSMTKTSVDCTMYICGDSTECSNLLLQYGSFCTQLNRALTGIAVEQDKNTQEVFAQVKQIYKTPPIKDFGGFNFSQILPDPSKPSKRSFIEDLLFNKVTLADAGFIKQYGDCLGDIAARDLICAQKFNGLTVLPPLLTDEMIAQYTSALLAGTITSGWTFGAGPALQIPFAMQMAYRFNGIGVTQNVLYENQKLIANQFNSAIGKIQDSLSSTPSALGKLQDVVNQNAQALNTLVKQLSSNFGAISSVLNDILSRLDKPEAEVQIDRLITGRLQSLQTYVTQQLIRAAEIRASANLAATKMSECVLGQSKRVDFCGKGYHLMSFPQSAPHGVVFLHVTYVPAQEKNFTTAPAICHDGKAHFPREGVFVSNGTHWFVTQRNFYEPQIITTDNTFVSGNCDVVIGIVNNTVYDPLQPELDSFKEELDKYFKNHTSPDVDLGDISGINASVVNIQKEIDRLNEVAKNLNESLIDLQELGKYEQYIKWPWYIWLGFIAGLIAIVMVTIMLCCMTSCCSCLKGCCSCGSCCKFDEDDSEPVLKGVKLHYT

SEQ ID NO: 203 - protein, 1273 aa, Artificial Sequence
  source: /note="Description of Artificial Sequence: Synthetic polypeptide"
MFVFLVLLPLVSSQCVNLTTRTQLPPAYTNSFTRGVYYPDKVFRSSVLHSTQDLFLPFFSNVTWFHAIHVSGTNGTKRFDNPVLPFNDGVYFASTEKSNIIRGWIFGTTLDSKTQSLLIVNNATNVVIKVCEFQFCNDPFLGVYYHKNNKSWMESEFRVYSSANNCTFEYVSQPFLMDLEGKQGNFKNLREFVFKNIDGYFKIYSKHTPINLVRDLPQGFSALEPLVDLPIGINITRFQTLLALHRSYLTPGDSSSGWTAGAAAYYVGYLQPRTFLLKYNENGTITDAVDCALDPLSETKCTLKSFTVEKGIYQTSNFRVQPTESIVRFPNITNLCPFGEVFNATRFASVYAWNRKRISNCVADYSVLYNSASFSTFKCYGVSPTKLNDLCFTNVYADSFVIRGDEVRQIAPGQTGKIADYNYKLPDDFTGCVIAWNSNNLDSKVGGNYNYLYRLFRKSNLKPFERDISTEIYQAGSTPCNGVEGFNCYFPLQSYGFQPTNGVGYQPYRVVVLSFELLHAPATVCGPKKSTNLVKNKCVNFNFNGLTGTGVLTESNKKFLPFQQFGRDIADTTDAVRDPQTLEILDITPCSFGGVSVITPGTNTSNQVAVLYQNVNCTEVPVAIHADQLTPTWRVYSTGSNVFQTRAGCLIGAEHVNNSYECDIPIGAGICASYQTQTNSPSRAGSVASQSIIAYTMSLGAENSVAYSNNSIAIPTNFTISVTTEILPVSMTKTSVDCTMYICGDSTECSNLLLQYGSFCTQLNRALTGIAVEQDKNTQEVFAQVKQIYKTPPIKDFGGFNFSQILPDPSKPSKRSFIEDLLFNKVTLADAGFIKQYGDCLGDIAARDLICAQKFNGLTVLPPLLTDEMIAQYTSALLAGTITSGWTFGAGPALQIPFAMQMAYRFNGIGVTQNVLYENQKLIANQFNSAIGKIQDSLSSPPSALGKLQDVVNQNAQALNTLVKQLSSNFGAISSVLNDILSRLDKPEAEVQIDRLITGRLQSLQTYVTQQLIRAAEIRASANLAATKMSECVLGQSKRVDFCGKGYHLMSFPQSAPHGVVFLHVTYVPAQEKNFTTAPAICHDGKAHFPREGVFVSNGTHWFVTQRNFYEPQIITTDNTFVSGNCDVVIGIVNNTVYDPLQPELDSFKEELDKYFKNHTSPDVDLGDISGINASVVNIQKEIDRLNEVAKNLNESLIDLQELGKYEQYIKWPWYIWLGFIAGLIAIVMVTIMLCCMTSCCSCLKGCCSCGSCCKFDEDDSEPVLKGVKLHYT

SEQ ID NO: 204 - protein, 1273 aa, Artificial Sequence
  source: /note="Description of Artificial Sequence: Synthetic polypeptide"
MFVFLVLLPLVSSQCVNLTTRTQLPPAYTNSFTRGVYYPDKVFRSSVLHSTQDLFLPFFSNVTWFHAIHVSGTNGTKRFDNPVLPFNDGVYFASTEKSNIIRGWIFGTTLDSKTQSLLIVNNATNVVIKVCEFQFCNDPFLGVYYHKNNKSWMESEFRVYSSANNCTFEYVSQPFLMDLEGKQGNFKNLREFVFKNIDGYFKIYSKHTPINLVRDLPQGFSALEPLVDLPIGINITRFQTLLALHRSYLTPGDSSSGWTAGAAAYYVGYLQPRTFLLKYNENGTITDAVDCALDPLSETKCTLKSFTVEKGIYQTSNFRVQPTESIVRFPNITNLCPFGEVFNATRFASVYAWNRKRISNCVADYSVLYNSASFSTFKCYGVSPTKLNDLCFTNVYADSFVIRGDEVRQIAPGQTGKIADYNYKLPDDFTGCVIAWNSNNLDSKVGGNYNYLYRLFRKSNLKPFERDISTEIYQAGSTPCNGVEGFNCYFPLQSYGFQPTNGVGYQPYRVVVLSFELLHAPATVCGPKKSTNLVKNKCVNFNFNGLTGTGVLTESNKKFLPFQQFGRDIADTTDAVRDPQTLEILDITPCSFGGVSVITPGTNTSNQVAVLYQNVNCTEVPVAIHADQLTPTWRVYSTGSNVFQTRAGCLIGAEHVNNSYECDIPIGAGICASYQTQTNSPSRAGSVASQSIIAYTMSLGAENSVAYSNNSIAIPTNFTISVTTEILPVSMTKTSVDCTMYICGDSTECSNLLLQYGSFCTQLNRALTGIAVEQDKNTQEVFAQVKQIYKTPPIKDFGGFNFSQILPDPSKPSKRSFIEDLLFNKVTLADAGFIKQYGDCLGDIAARDLICAQKFNGLTVLPPLLTDEMIAQYTSALLAGTITSGWTFGAGPALQIPFAMQMAYRFNGIGVTQNVLYENQKLIANQFNSAIGKIQDSLSSTPSPLGKLQDVVNQNAQALNTLVKQLSSNFGAISSVLNDILSRLDKPEAEVQIDRLITGRLQSLQTYVTQQLIRAAEIRASANLAATKMSECVLGQSKRVDFCGKGYHLMSFPQSAPHGVVFLHVTYVPAQEKNFTTAPAICHDGKAHFPREGVFVSNGTHWFVTQRNFYEPQIITTDNTFVSGNCDVVIGIVNNTVYDPLQPELDSFKEELDKYFKNHTSPDVDLGDISGINASVVNIQKEIDRLNEVAKNLNESLIDLQELGKYEQYIKWPWYIWLGFIAGLIAIVMVTIMLCCMTSCCSCLKGCCSCGSCCKFDEDDSEPVLKGVKLHYT

SEQ ID NO: 205 - protein, 1273 aa, Artificial Sequence
  source: /note="Description of Artificial Sequence: Synthetic polypeptide"
MFVFLVLLPLVSSQCVNLTTRTQLPPAYTNSFTRGVYYPDKVFRSSVLHSTQDLFLPFFSNVTWFHAIHVSGTNGTKRFDNPVLPFNDGVYFASTEKSNIIRGWIFGTTLDSKTQSLLIVNNATNVVIKVCEFQFCNDPFLGVYYHKNNKSWMESEFRVYSSANNCTFEYVSQPFLMDLEGKQGNFKNLREFVFKNIDGYFKIYSKHTPINLVRDLPQGFSALEPLVDLPIGINITRFQTLLALHRSYLTPGDSSSGWTAGAAAYYVGYLQPRTFLLKYNENGTITDAVDCALDPLSETKCTLKSFTVEKGIYQTSNFRVQPTESIVRFPNITNLCPFGEVFNATRFASVYAWNRKRISNCVADYSVLYNSASFSTFKCYGVSPTKLNDLCFTNVYADSFVIRGDEVRQIAPGQTGKIADYNYKLPDDFTGCVIAWNSNNLDSKVGGNYNYLYRLFRKSNLKPFERDISTEIYQAGSTPCNGVEGFNCYFPLQSYGFQPTNGVGYQPYRVVVLSFELLHAPATVCGPKKSTNLVKNKCVNFNFNGLTGTGVLTESNKKFLPFQQFGRDIADTTDAVRDPQTLEILDITPCSFGGVSVITPGTNTSNQVAVLYQNVNCTEVPVAIHADQLTPTWRVYSTGSNVFQTRAGCLIGAEHVNNSYECDIPIGAGICASYQTQTNSPSRAGSVASQSIIAYTMSLGAENSVAYSNNSIAIPTNFTISVTTEILPVSMTKTSVDCTMYICGDSTECSNLLLQYGSFCTQLNRALTGIAVEQDKNTQEVFAQVKQIYKTPPIKDFGGFNFSQILPDPSKPSKRSFIEDLLFNKVTLADAGFIKQYGDCLGDIAARDLICAQKFNGLTVLPPLLTDEMIAQYTSALLAGTITSGWTFGAGPALQIPFAMQMAYRFNGIGVTQNVLYENQKLIANQFNSAIGKIQDSLSSPASALGKLQDVVNQNAQALNTLVKQLSSNFGAISSVLNDILSRLDKPEAEVQIDRLITGRLQSLQTYVTQQLIRAAEIRASANLAATKMSECVLGQSKRVDFCGKGYHLMSFPQSAPHGVVFLHVTYVPAQEKNFTTAPAICHDGKAHFPREGVFVSNGTHWFVTQRNFYEPQIITTDNTFVSGNCDVVIGIVNNTVYDPLQPELDSFKEELDKYFKNHTSPDVDLGDISGINASVVNIQKEIDRLNEVAKNLNESLIDLQELGKYEQYIKWPWYIWLGFIAGLIAIVMVTIMLCCMTSCCSCLKGCCSCGSCCKFDEDDSEPVLKGVKLHYT

SEQ ID NO: 206 - protein, 1273 aa, Artificial Sequence
  source: /note="Description of Artificial Sequence: Synthetic polypeptide"
MFVFLVLLPLVSSQCVNLTTRTQLPPAYTNSFTRGVYYPDKVFRSSVLHSTQDLFLPFFSNVTWFHAIHVSGTNGTKRFDNPVLPFNDGVYFASTEKSNIIRGWIFGTTLDSKTQSLLIVNNATNVVIKVCEFQFCNDPFLGVYYHKNNKSWMESEFRVYSSANNCTFEYVSQPFLMDLEGKQGNFKNLREFVFKNIDGYFKIYSKHTPINLVRDLPQGFSALEPLVDLPIGINITRFQTLLALHRSYLTPGDSSSGWTAGAAAYYVGYLQPRTFLLKYNENGTITDAVDCALDPLSETKCTLKSFTVEKGIYQTSNFRVQPTESIVRFPNITNLCPFGEVFNATRFASVYAWNRKRISNCVADYSVLYNSASFSTFKCYGVSPTKLNDLCFTNVYADSFVIRGDEVRQIAPGQTGKIADYNYKLPDDFTGCVIAWNSNNLDSKVGGNYNYLYRLFRKSNLKPFERDISTEIYQAGSTPCNGVEGFNCYFPLQSYGFQPTNGVGYQPYRVVVLSFELLHAPATVCGPKKSTNLVKNKCVNFNFNGLTGTGVLTESNKKFLPFQQFGRDIADTTDAVRDPQTLEILDITPCSFGGVSVITPGTNTSNQVAVLYQNVNCTEVPVAIHADQLTPTWRVYSTGSNVFQTRAGCLIGAEHVNNSYECDIPIGAGICASYQTQTNSPSRAGSVASQSIIAYTMSLGAENSVAYSNNSIAIPTNFTISVTTEILPVSMTKTSVDCTMYICGDSTECSNLLLQYGSFCTQLNRALTGIAVEQDKNTQEVFAQVKQIYKTPPIKDFGGFNFSQILPDPSKPSKRSFIEDLLFNKVTLADAGFIKQYGDCLGDIAARDLICAQKFNGLTVLPPLLTDEMIAQYTSALLAGTITSGWTFGAGPALQIPFAMQMAYRFNGIGVTQNVLYENQKLIANQFNSAIGKIQDSLSSTASPLGKLQDVVNQNAQALNTLVKQLSSNFGAISSVLNDILSRLDKPEAEVQIDRLITGRLQSLQTYVTQQLIRAAEIRASANLAATKMSECVLGQSKRVDFCGKGYHLMSFPQSAPHGVVFLHVTYVPAQEKNFTTAPAICHDGKAHFPREGVFVSNGTHWFVTQRNFYEPQIITTDNTFVSGNCDVVIGIVNNTVYDPLQPELDSFKEELDKYFKNHTSPDVDLGDISGINASVVNIQKEIDRLNEVAKNLNESLIDLQELGKYEQYIKWPWYIWLGFIAGLIAIVMVTIMLCCMTSCCSCLKGCCSCGSCCKFDEDDSEPVLKGVKLHYT

SEQ ID NO: 207 - protein, 1273 aa, Artificial Sequence
  source: /note="Description of Artificial Sequence: Synthetic polypeptide"
MFVFLVLLPLVSSQCVNLTTRTQLPPAYTNSFTRGVYYPDKVFRSSVLHSTQDLFLPFFSNVTWFHAIHVSGTNGTKRFDNPVLPFNDGVYFASTEKSNIIRGWIFGTTLDSKTQSLLIVNNATNVVIKVCEFQFCNDPFLGVYYHKNNKSWMESEFRVYSSANNCTFEYVSQPFLMDLEGKQGNFKNLREFVFKNIDGYFKIYSKHTPINLVRDLPQGFSALEPLVDLPIGINITRFQTLLALHRSYLTPGDSSSGWTAGAAAYYVGYLQPRTFLLKYNENGTITDAVDCALDPLSETKCTLKSFTVEKGIYQTSNFRVQPTESIVRFPNITNLCPFGEVFNATRFASVYAWNRKRISNCVADYSVLYNSASFSTFKCYGVSPTKLNDLCFTNVYADSFVIRGDEVRQIAPGQTGKIADYNYKLPDDFTGCVIAWNSNNLDSKVGGNYNYLYRLFRKSNLKPFERDISTEIYQAGSTPCNGVEGFNCYFPLQSYGFQPTNGVGYQPYRVVVLSFELLHAPATVCGPKKSTNLVKNKCVNFNFNGLTGTGVLTESNKKFLPFQQFGRDIADTTDAVRDPQTLEILDITPCSFGGVSVITPGTNTSNQVAVLYQNVNCTEVPVAIHADQLTPTWRVYSTGSNVFQTRAGCLIGAEHVNNSYECDIPIGAGICASYQTQTNSPSRAGSVASQSIIAYTMSLGAENSVAYSNNSIAIPTNFTISVTTEILPVSMTKTSVDCTMYICGDSTECSNLLLQYGSFCTQLNRALTGIAVEQDKNTQEVFAQVKQIYKTPPIKDFGGFNFSQILPDPSKPSKRSFIEDLLFNKVTLADAGFIKQYGDCLGDIAARDLICAQKFNGLTVLPPLLTDEMIAQYTSALLAGTITSGWTFGAGPALQIPFAMQMAYRFNGIGVTQNVLYENQKLIANQFNSAIGKIQDSLSSTPSALGKLQDVVNQNAQALNTLVKQLSSNFGAISSVLNDILSRLDPPEAEVQIDRLITGRLQSLQTYVTQQLIRAAEIRASANLAATKMSECVLGQSKRVDFCGKGYHLMSFPQSAPHGVVFLHVTYVPAQEKNFTTAPAICHDGKAHFPREGVFVSNGTHWFVTQRNFYEPQIITTDNTFVSGNCDVVIGIVNNTVYDPLQPELDSFKEELDKYFKNHTSPDVDLGDISGINASVVNIQKEIDRLNEVAKNLNESLIDLQELGKYEQYIKWPWYIWLGFIAGLIAIVMVTIMLCCMTSCCSCLKGCCSCGSCCKFDEDDSEPVLKGVKLHYT

SEQ ID NO: 208 - protein, 1273 aa, Artificial Sequence
  source: /note="Description of Artificial Sequence: Synthetic polypeptide"
MFVFLVLLPLVSSQCVNLTTRTQLPPAYTNSFTRGVYYPDKVFRSSVLHSTQDLFLPFFSNVTWFHAIHVSGTNGTKRFDNPVLPFNDGVYFASTEKSNIIRGWIFGTTLDSKTQSLLIVNNATNVVIKVCEFQFCNDPFLGVYYHKNNKSWMESEFRVYSSANNCTFEYVSQPFLMDLEGKQGNFKNLREFVFKNIDGYFKIYSKHTPINLVRDLPQGFSALEPLVDLPIGINITRFQTLLALHRSYLTPGDSSSGWTAGAAAYYVGYLQPRTFLLKYNENGTITDAVDCALDPLSETKCTLKSFTVEKGIYQTSNFRVQPTESIVRFPNITNLCPFGEVFNATRFASVYAWNRKRISNCVADYSVLYNSASFSTFKCYGVSPTKLNDLCFTNVYADSFVIRGDEVRQIAPGQTGKIADYNYKLPDDFTGCVIAWNSNNLDSKVGGNYNYLYRLFRKSNLKPFERDISTEIYQAGSTPCNGVEGFNCYFPLQSYGFQPTNGVGYQPYRVVVLSFELLHAPATVCGPKKSTNLVKNKCVNFNFNGLTGTGVLTESNKKFLPFQQFGRDIADTTDAVRDPQTLEILDITPCSFGGVSVITPGTNTSNQVAVLYQNVNCTEVPVAIHADQLTPTWRVYSTGSNVFQTRAGCLIGAEHVNNSYECDIPIGAGICASYQTQTNSPSRAGSVASQSIIAYTMSLGAENSVAYSNNSIAIPTNFTISVTTEILPVSMTKTSVDCTMYICGDSTECSNLLLQYGSFCTQLNRALTGIAVEQDKNTQEVFAQVKQIYKTPPIKDFGGFNFSQILPDPSKPSKRSFIEDLLFNKVTLADAGFIKQYGDCLGDIAARDLICAQKFNGLTVLPPLLTDEMIAQYTSALLAGTITSGWTFGAGPALQIPFAMQMAYRFNGIGVTQNVLYENQKLIANQFNSAIGKIQDSLSSPPSALGKLQDVVNQNAQALNTLVKQLSSNFGAISSVLNDILSRLDPPEAEVQIDRLITGRLQSLQTYVTQQLIRAAEIRASANLAATKMSECVLGQSKRVDFCGKGYHLMSFPQSAPHGVVFLHVTYVPAQEKNFTTAPAICHDGKAHFPREGVFVSNGTHWFVTQRNFYEPQIITTDNTFVSGNCDVVIGIVNNTVYDPLQPELDSFKEELDKYFKNHTSPDVDLGDISGINASVVNIQKEIDRLNEVAKNLNESLIDLQELGKYEQYIKWPWYIWLGFIAGLIAIVMVTIMLCCMTSCCSCLKGCCSCGSCCKFDEDDSEPVLKGVKLHYT

SEQ ID NO: 209 - protein, 1273 aa, Artificial Sequence
  source: /note="Description of Artificial Sequence: Synthetic polypeptide"
MFVFLVLLPLVSSQCVNLTTRTQLPPAYTNSFTRGVYYPDKVFRSSVLHSTQDLFLPFFSNVTWFHAIHVSGTNGTKRFDNPVLPFNDGVYFASTEKSNIIRGWIFGTTLDSKTQSLLIVNNATNVVIKVCEFQFCNDPFLGVYYHKNNKSWMESEFRVYSSANNCTFEYVSQPFLMDLEGKQGNFKNLREFVFKNIDGYFKIYSKHTPINLVRDLPQGFSALEPLVDLPIGINITRFQTLLALHRSYLTPGDSSSGWTAGAAAYYVGYLQPRTFLLKYNENGTITDAVDCALDPLSETKCTLKSFTVEKGIYQTSNFRVQPTESIVRFPNITNLCPFGEVFNATRFASVYAWNRKRISNCVADYSVLYNSASFSTFKCYGVSPTKLNDLCFTNVYADSFVIRGDEVRQIAPGQTGKIADYNYKLPDDFTGCVIAWNSNNLDSKVGGNYNYLYRLFRKSNLKPFERDISTEIYQAGSTPCNGVEGFNCYFPLQSYGFQPTNGVGYQPYRVVVLSFELLHAPATVCGPKKSTNLVKNKCVNFNFNGLTGTGVLTESNKKFLPFQQFGRDIADTTDAVRDPQTLEILDITPCSFGGVSVITPGTNTSNQVAVLYQNVNCTEVPVAIHADQLTPTWRVYSTGSNVFQTRAGCLIGAEHVNNSYECDIPIGAGICASYQTQTNSPSRAGSVASQSIIAYTMSLGAENSVAYSNNSIAIPTNFTISVTTEILPVSMTKTSVDCTMYICGDSTECSNLLLQYGSFCTQLNRALTGIAVEQDKNTQEVFAQVKQIYKTPPIKDFGGFNFSQILPDPSKPSKRSFIEDLLFNKVTLADAGFIKQYGDCLGDIAARDLICAQKFNGLTVLPPLLTDEMIAQYTSALLAGTITSGWTFGAGPALQIPFAMQMAYRFNGIGVTQNVLYENQKLIANQFNSAIGKIQDSLSSTPSPLGKLQDVVNQNAQALNTLVKQLSSNFGAISSVLNDILSRLDPPEAEVQIDRLITGRLQSLQTYVTQQLIRAAEIRASANLAATKMSECVLGQSKRVDFCGKGYHLMSFPQSAPHGVVFLHVTYVPAQEKNFTTAPAICHDGKAHFPREGVFVSNGTHWFVTQRNFYEPQIITTDNTFVSGNCDVVIGIVNNTVYDPLQPELDSFKEELDKYFKNHTSPDVDLGDISGINASVVNIQKEIDRLNEVAKNLNESLIDLQELGKYEQYIKWPWYIWLGFIAGLIAIVMVTIMLCCMTSCCSCLKGCCSCGSCCKFDEDDSEPVLKGVKLHYT

SEQ ID NO: 210 - protein, 1273 aa, Artificial Sequence
  source: /note="Description of Artificial Sequence: Synthetic polypeptide"
MFVFLVLLPLVSSQCVNLTTRTQLPPAYTNSFTRGVYYPDKVFRSSVLHSTQDLFLPFFSNVTWFHAIHVSGTNGTKRFDNPVLPFNDGVYFASTEKSNIIRGWIFGTTLDSKTQSLLIVNNATNVVIKVCEFQFCNDPFLGVYYHKNNKSWMESEFRVYSSANNCTFEYVSQPFLMDLEGKQGNFKNLREFVFKNIDGYFKIYSKHTPINLVRDLPQGFSALEPLVDLPIGINITRFQTLLALHRSYLTPGDSSSGWTAGAAAYYVGYLQPRTFLLKYNENGTITDAVDCALDPLSETKCTLKSFTVEKGIYQTSNFRVQPTESIVRFPNITNLCPFGEVFNATRFASVYAWNRKRISNCVADYSVLYNSASFSTFKCYGVSPTKLNDLCFTNVYADSFVIRGDEVRQIAPGQTGKIADYNYKLPDDFTGCVIAWNSNNLDSKVGGNYNYLYRLFRKSNLKPFERDISTEIYQAGSTPCNGVEGFNCYFPLQSYGFQPTNGVGYQPYRVVVLSFELLHAPATVCGPKKSTNLVKNKCVNFNFNGLTGTGVLTESNKKFLPFQQFGRDIADTTDAVRDPQTLEILDITPCSFGGVSVITPGTNTSNQVAVLYQNVNCTEVPVAIHADQLTPTWRVYSTGSNVFQTRAGCLIGAEHVNNSYECDIPIGAGICASYQTQTNSPSRAGSVASQSIIAYTMSLGAENSVAYSNNSIAIPTNFTISVTTEILPVSMTKTSVDCTMYICGDSTECSNLLLQYGSFCTQLNRALTGIAVEQDKNTQEVFAQVKQIYKTPPIKDFGGFNFSQILPDPSKPSKRSFIEDLLFNKVTLADAGFIKQYGDCLGDIAARDLICAQKFNGLTVLPPLLTDEMIAQYTSALLAGTITSGWTFGAGPALQIPFAMQMAYRFNGIGVTQNVLYENQKLIANQFNSAIGKIQDSLSSPASALGKLQDVVNQNAQALNTLVKQLSSNFGAISSVLNDILSRLDPPEAEVQIDRLITGRLQSLQTYVTQQLIRAAEIRASANLAATKMSECVLGQSKRVDFCGKGYHLMSFPQSAPHGVVFLHVTYVPAQEKNFTTAPAICHDGKAHFPREGVFVSNGTHWFVTQRNFYEPQIITTDNTFVSGNCDVVIGIVNNTVYDPLQPELDSFKEELDKYFKNHTSPDVDLGDISGINASVVNIQKEIDRLNEVAKNLNESLIDLQELGKYEQYIKWPWYIWLGFIAGLIAIVMVTIMLCCMTSCCSCLKGCCSCGSCCKFDEDDSEPVLKGVKLHYT

SEQ ID NO: 211 - protein, 1273 aa, Artificial Sequence
  source: /note="Description of Artificial Sequence: Synthetic polypeptide"
MFVFLVLLPLVSSQCVNLTTRTQLPPAYTNSFTRGVYYPDKVFRSSVLHSTQDLFLPFFSNVTWFHAIHVSGTNGTKRFDNPVLPFNDGVYFASTEKSNIIRGWIFGTTLDSKTQSLLIVNNATNVVIKVCEFQFCNDPFLGVYYHKNNKSWMESEFRVYSSANNCTFEYVSQPFLMDLEGKQGNFKNLREFVFKNIDGYFKIYSKHTPINLVRDLPQGFSALEPLVDLPIGINITRFQTLLALHRSYLTPGDSSSGWTAGAAAYYVGYLQPRTFLLKYNENGTITDAVDCALDPLSETKCTLKSFTVEKGIYQTSNFRVQPTESIVRFPNITNLCPFGEVFNATRFASVYAWNRKRISNCVADYSVLYNSASFSTFKCYGVSPTKLNDLCFTNVYADSFVIRGDEVRQIAPGQTGKIADYNYKLPDDFTGCVIAWNSNNLDSKVGGNYNYLYRLFRKSNLKPFERDISTEIYQAGSTPCNGVEGFNCYFPLQSYGFQPTNGVGYQPYRVVVLSFELLHAPATVCGPKKSTNLVKNKCVNFNFNGLTGTGVLTESNKKFLPFQQFGRDIADTTDAVRDPQTLEILDITPCSFGGVSVITPGTNTSNQVAVLYQNVNCTEVPVAIHADQLTPTWRVYSTGSNVFQTRAGCLIGAEHVNNSYECDIPIGAGICASYQTQTNSPSRAGSVASQSIIAYTMSLGAENSVAYSNNSIAIPTNFTISVTTEILPVSMTKTSVDCTMYICGDSTECSNLLLQYGSFCTQLNRALTGIAVEQDKNTQEVFAQVKQIYKTPPIKDFGGFNFSQILPDPSKPSKRSFIEDLLFNKVTLADAGFIKQYGDCLGDIAARDLICAQKFNGLTVLPPLLTDEMIAQYTSALLAGTITSGWTFGAGPALQIPFAMQMAYRFNGIGVTQNVLYENQKLIANQFNSAIGKIQDSLSSTASPLGKLQDVVNQNAQALNTLVKQLSSNFGAISSVLNDILSRLDPPEAEVQIDRLITGRLQSLQTYVTQQLIRAAEIRASANLAATKMSECVLGQSKRVDFCGKGYHLMSFPQSAPHGVVFLHVTYVPAQEKNFTTAPAICHDGKAHFPREGVFVSNGTHWFVTQRNFYEPQIITTDNTFVSGNCDVVIGIVNNTVYDPLQPELDSFKEELDKYFKNHTSPDVDLGDISGINASVVNIQKEIDRLNEVAKNLNESLIDLQELGKYEQYIKWPWYIWLGFIAGLIAIVMVTIMLCCMTSCCSCLKGCCSCGSCCKFDEDDSEPVLKGVKLHYT

SEQ ID NO: 212 - protein, 1273 aa, Artificial Sequence
  source: /note="Description of Artificial Sequence: Synthetic polypeptide"
MFVFLVLLPLVSSQCVNLTTRTQLPPAYTNSFTRGVYYPDKVFRSSVLHSTQDLFLPFFSNVTWFHAIHVSGTNGTKRFDNPVLPFNDGVYFASTEKSNIIRGWIFGTTLDSKTQSLLIVNNATNVVIKVCEFQFCNDPFLGVYYHKNNKSWMESEFRVYSSANNCTFEYVSQPFLMDLEGKQGNFKNLREFVFKNIDGYFKIYSKHTPINLVRDLPQGFSALEPLVDLPIGINITRFQTLLALHRSYLTPGDSSSGWTAGAAAYYVGYLQPRTFLLKYNENGTITDAVDCALDPLSETKCTLKSFTVEKGIYQTSNFRVQPTESIVRFPNITNLCPFGEVFNATRFASVYAWNRKRISNCVADYSVLYNSASFSTFKCYGVSPTKLNDLCFTNVYADSFVIRGDEVRQIAPGQTGKIADYNYKLPDDFTGCVIAWNSNNLDSKVGGNYNYLYRLFRKSNLKPFERDISTEIYQAGSTPCNGVEGFNCYFPLQSYGFQPTNGVGYQPYRVVVLSFELLHAPATVCGPKKSTNLVKNKCVNFNFNGLTGTGVLTESNKKFLPFQQFGRDIADTTDAVRDPQTLEILDITPCSFGGVSVITPGTNTSNQVAVLYQNVNCTEVPVAIHADQLTPTWRVYSTGSNVFQTRAGCLIGAEHVNNSYECDIPIGAGICASYQTQTNSPRRARSVASQSIIAYTMSLGAENSVAYSNNSIAIPTNFTISVTTEILPVSMTKTSVDCTMYICGDSTECSNLLLQYGSFCTQLNRALTGIAVEQDKNTQEVFAQVKQIYKTPPIKDFGGFNFSQILPDPSKPSKRSFIEDLLFNKVTLADAGFIKQYGDCLGDIAARDLICAQKFNGLTVLPPLLTDEMIAQYTSALLAGTITSGWTFGAGPALQIPFAMQMAYRFNGIGVTQNVLYENQKLIANQFNSAIGKIQDSLSSTPSALGKLQDVVNQNAQALNTLVKQLSSNFGAISSVLNDILSRLDKVEAEVQIDRLITGRLQSLQTYVTQQLIRAAEIRASANLAATKMSECVLGQSKRVDFCGKGYHLMSFPQSAPHGVVFLHVTYVPAQEKNFTTAPAICHDGKAHFPREGVFVSNGTHWFVTQRNFYEPQIITTDNTFVSGNCDVVIGIVNNTVYDPLQPELDSFKEELDKYFKNHTSPDVDLGDISGINASVVNIQKEIDRLNEVAKNLNESLIDLQELGKYEQYIKWPWYIWLGFIAGLIAIVMVTIMLCCMTSCCSCLKGCCSCGSCCKFDEDDSEPVLKGVKLHYT

SEQ ID NO: 213 - protein, 1273 aa, Artificial Sequence
  source: /note="Description of Artificial Sequence: Synthetic polypeptide"
MFVFLVLLPLVSSQCVNLTTRTQLPPAYTNSFTRGVYYPDKVFRSSVLHSTQDLFLPFFSNVTWFHAIHVSGTNGTKRFDNPVLPFNDGVYFASTEKSNIIRGWIFGTTLDSKTQSLLIVNNATNVVIKVCEFQFCNDPFLGVYYHKNNKSWMESEFRVYSSANNCTFEYVSQPFLMDLEGKQGNFKNLREFVFKNIDGYFKIYSKHTPINLVRDLPQGFSALEPLVDLPIGINITRFQTLLALHRSYLTPGDSSSGWTAGAAAYYVGYLQPRTFLLKYNENGTITDAVDCALDPLSETKCTLKSFTVEKGIYQTSNFRVQPTESIVRFPNITNLCPFGEVFNATRFASVYAWNRKRISNCVADYSVLYNSASFSTFKCYGVSPTKLNDLCFTNVYADSFVIRGDEVRQIAPGQTGKIADYNYKLPDDFTGCVIAWNSNNLDSKVGGNYNYLYRLFRKSNLKPFERDISTEIYQAGSTPCNGVEGFNCYFPLQSYGFQPTNGVGYQPYRVVVLSFELLHAPATVCGPKKSTNLVKNKCVNFNFNGLTGTGVLTESNKKFLPFQQFGRDIADTTDAVRDPQTLEILDITPCSFGGVSVITPGTNTSNQVAVLYQNVNCTEVPVAIHADQLTPTWRVYSTGSNVFQTRAGCLIGAEHVNNSYECDIPIGAGICASYQTQTNSPRRARSVASQSIIAYTMSLGAENSVAYSNNSIAIPTNFTISVTTEILPVSMTKTSVDCTMYICGDSTECSNLLLQYGSFCTQLNRALTGIAVEQDKNTQEVFAQVKQIYKTPPIKDFGGFNFSQILPDPSKPSKRSFIEDLLFNKVTLADAGFIKQYGDCLGDIAARDLICAQKFNGLTVLPPLLTDEMIAQYTSALLAGTITSGWTFGAGPALQIPFAMQMAYRFNGIGVTQNVLYENQKLIANQFNSAIGKIQDSLSSPPSALGKLQDVVNQNAQALNTLVKQLSSNFGAISSVLNDILSRLDKVEAEVQIDRLITGRLQSLQTYVTQQLIRAAEIRASANLAATKMSECVLGQSKRVDFCGKGYHLMSFPQSAPHGVVFLHVTYVPAQEKNFTTAPAICHDGKAHFPREGVFVSNGTHWFVTQRNFYEPQIITTDNTFVSGNCDVVIGIVNNTVYDPLQPELDSFKEELDKYFKNHTSPDVDLGDISGINASVVNIQKEIDRLNEVAKNLNESLIDLQELGKYEQYIKWPWYIWLGFIAGLIAIVMVTIMLCCMTSCCSCLKGCCSCGSCCKFDEDDSEPVLKGVKLHYT

SEQ ID NO: 214 - protein, 1273 aa, Artificial Sequence
  source: /note="Description of Artificial Sequence: Synthetic polypeptide"
MFVFLVLLPLVSSQCVNLTTRTQLPPAYTNSFTRGVYYPDKVFRSSVLHSTQDLFLPFFSNVTWFHAIHVSGTNGTKRFDNPVLPFNDGVYFASTEKSNIIRGWIFGTTLDSKTQSLLIVNNATNVVIKVCEFQFCNDPFLGVYYHKNNKSWMESEFRVYSSANNCTFEYVSQPFLMDLEGKQGNFKNLREFVFKNIDGYFKIYSKHTPINLVRDLPQGFSALEPLVDLPIGINITRFQTLLALHRSYLTPGDSSSGWTAGAAAYYVGYLQPRTFLLKYNENGTITDAVDCALDPLSETKCTLKSFTVEKGIYQTSNFRVQPTESIVRFPNITNLCPFGEVFNATRFASVYAWNRKRISNCVADYSVLYNSASFSTFKCYGVSPTKLNDLCFTNVYADSFVIRGDEVRQIAPGQTGKIADYNYKLPDDFTGCVIAWNSNNLDSKVGGNYNYLYRLFRKSNLKPFERDISTEIYQAGSTPCNGVEGFNCYFPLQSYGFQPTNGVGYQPYRVVVLSFELLHAPATVCGPKKSTNLVKNKCVNFNFNGLTGTGVLTESNKKFLPFQQFGRDIADTTDAVRDPQTLEILDITPCSFGGVSVITPGTNTSNQVAVLYQNVNCTEVPVAIHADQLTPTWRVYSTGSNVFQTRAGCLIGAEHVNNSYECDIPIGAGICASYQTQTNSPRRARSVASQSIIAYTMSLGAENSVAYSNNSIAIPTNFTISVTTEILPVSMTKTSVDCTMYICGDSTECSNLLLQYGSFCTQLNRALTGIAVEQDKNTQEVFAQVKQIYKTPPIKDFGGFNFSQILPDPSKPSKRSFIEDLLFNKVTLADAGFIKQYGDCLGDIAARDLICAQKFNGLTVLPPLLTDEMIAQYTSALLAGTITSGWTFGAGPALQIPFAMQMAYRFNGIGVTQNVLYENQKLIANQFNSAIGKIQDSLSSTPSPLGKLQDVVNQNAQALNTLVKQLSSNFGAISSVLNDILSRLDKVEAEVQIDRLITGRLQSLQTYVTQQLIRAAEIRASANLAATKMSECVLGQSKRVDFCGKGYHLMSFPQSAPHGVVFLHVTYVPAQEKNFTTAPAICHDGKAHFPREGVFVSNGTHWFVTQRNFYEPQIITTDNTFVSGNCDVVIGIVNNTVYDPLQPELDSFKEELDKYFKNHTSPDVDLGDISGINASVVNIQKEIDRLNEVAKNLNESLIDLQELGKYEQYIKWPWYIWLGFIAGLIAIVMVTIMLCCMTSCCSCLKGCCSCGSCCKFDEDDSEPVLKGVKLHYT

SEQ ID NO: 215 - protein, 1273 aa, Artificial Sequence
  source: /note="Description of Artificial Sequence: Synthetic polypeptide"
MFVFLVLLPLVSSQCVNLTTRTQLPPAYTNSFTRGVYYPDKVFRSSVLHSTQDLFLPFFSNVTWFHAIHVSGTNGTKRFDNPVLPFNDGVYFASTEKSNIIRGWIFGTTLDSKTQSLLIVNNATNVVIKVCEFQFCNDPFLGVYYHKNNKSWMESEFRVYSSANNCTFEYVSQPFLMDLEGKQGNFKNLREFVFKNIDGYFKIYSKHTPINLVRDLPQGFSALEPLVDLPIGINITRFQTLLALHRSYLTPGDSSSGWTAGAAAYYVGYLQPRTFLLKYNENGTITDAVDCALDPLSETKCTLKSFTVEKGIYQTSNFRVQPTESIVRFPNITNLCPFGEVFNATRFASVYAWNRKRISNCVADYSVLYNSASFSTFKCYGVSPTKLNDLCFTNVYADSFVIRGDEVRQIAPGQTGKIADYNYKLPDDFTGCVIAWNSNNLDSKVGGNYNYLYRLFRKSNLKPFERDISTEIYQAGSTPCNGVEGFNCYFPLQSYGFQPTNGVGYQPYRVVVLSFELLHAPATVCGPKKSTNLVKNKCVNFNFNGLTGTGVLTESNKKFLPFQQFGRDIADTTDAVRDPQTLEILDITPCSFGGVSVITPGTNTSNQVAVLYQNVNCTEVPVAIHADQLTPTWRVYSTGSNVFQTRAGCLIGAEHVNNSYECDIPIGAGICASYQTQTNSPRRARSVASQSIIAYTMSLGAENSVAYSNNSIAIPTNFTISVTTEILPVSMTKTSVDCTMYICGDSTECSNLLLQYGSFCTQLNRALTGIAVEQDKNTQEVFAQVKQIYKTPPIKDFGGFNFSQILPDPSKPSKRSFIEDLLFNKVTLADAGFIKQYGDCLGDIAARDLICAQKFNGLTVLPPLLTDEMIAQYTSALLAGTITSGWTFGAGPALQIPFAMQMAYRFNGIGVTQNVLYENQKLIANQFNSAIGKIQDSLSSPASALGKLQDVVNQNAQALNTLVKQLSSNFGAISSVLNDILSRLDKVEAEVQIDRLITGRLQSLQTYVTQQLIRAAEIRASANLAATKMSECVLGQSKRVDFCGKGYHLMSFPQSAPHGVVFLHVTYVPAQEKNFTTAPAICHDGKAHFPREGVFVSNGTHWFVTQRNFYEPQIITTDNTFVSGNCDVVIGIVNNTVYDPLQPELDSFKEELDKYFKNHTSPDVDLGDISGINASVVNIQKEIDRLNEVAKNLNESLIDLQELGKYEQYIKWPWYIWLGFIAGLIAIVMVTIMLCCMTSCCSCLKGCCSCGSCCKFDEDDSEPVLKGVKLHYT

SEQ ID NO: 216 - protein, 1273 aa, Artificial Sequence
  source: /note="Description of Artificial Sequence: Synthetic polypeptide"
MFVFLVLLPLVSSQCVNLTTRTQLPPAYTNSFTRGVYYPDKVFRSSVLHSTQDLFLPFFSNVTWFHAIHVSGTNGTKRFDNPVLPFNDGVYFASTEKSNIIRGWIFGTTLDSKTQSLLIVNNATNVVIKVCEFQFCNDPFLGVYYHKNNKSWMESEFRVYSSANNCTFEYVSQPFLMDLEGKQGNFKNLREFVFKNIDGYFKIYSKHTPINLVRDLPQGFSALEPLVDLPIGINITRFQTLLALHRSYLTPGDSSSGWTAGAAAYYVGYLQPRTFLLKYNENGTITDAVDCALDPLSETKCTLKSFTVEKGIYQTSNFRVQPTESIVRFPNITNLCPFGEVFNATRFASVYAWNRKRISNCVADYSVLYNSASFSTFKCYGVSPTKLNDLCFTNVYADSFVIRGDEVRQIAPGQTGKIADYNYKLPDDFTGCVIAWNSNNLDSKVGGNYNYLYRLFRKSNLKPFERDISTEIYQAGSTPCNGVEGFNCYFPLQSYGFQPTNGVGYQPYRVVVLSFELLHAPATVCGPKKSTNLVKNKCVNFNFNGLTGTGVLTESNKKFLPFQQFGRDIADTTDAVRDPQTLEILDITPCSFGGVSVITPGTNTSNQVAVLYQNVNCTEVPVAIHADQLTPTWRVYSTGSNVFQTRAGCLIGAEHVNNSYECDIPIGAGICASYQTQTNSPRRARSVASQSIIAYTMSLGAENSVAYSNNSIAIPTNFTISVTTEILPVSMTKTSVDCTMYICGDSTECSNLLLQYGSFCTQLNRALTGIAVEQDKNTQEVFAQVKQIYKTPPIKDFGGFNFSQILPDPSKPSKRSFIEDLLFNKVTLADAGFIKQYGDCLGDIAARDLICAQKFNGLTVLPPLLTDEMIAQYTSALLAGTITSGWTFGAGPALQIPFAMQMAYRFNGIGVTQNVLYENQKLIANQFNSAIGKIQDSLSSTASPLGKLQDVVNQNAQALNTLVKQLSSNFGAISSVLNDILSRLDKVEAEVQIDRLITGRLQSLQTYVTQQLIRAAEIRASANLAATKMSECVLGQSKRVDFCGKGYHLMSFPQSAPHGVVFLHVTYVPAQEKNFTTAPAICHDGKAHFPREGVFVSNGTHWFVTQRNFYEPQIITTDNTFVSGNCDVVIGIVNNTVYDPLQPELDSFKEELDKYFKNHTSPDVDLGDISGINASVVNIQKEIDRLNEVAKNLNESLIDLQELGKYEQYIKWPWYIWLGFIAGLIAIVMVTIMLCCMTSCCSCLKGCCSCGSCCKFDEDDSEPVLKGVKLHYT

SEQ ID NO: 217 - protein, 1273 aa, Artificial Sequence
  source: /note="Description of Artificial Sequence: Synthetic polypeptide"
MFVFLVLLPLVSSQCVNLTTRTQLPPAYTNSFTRGVYYPDKVFRSSVLHSTQDLFLPFFSNVTWFHAIHVSGTNGTKRFDNPVLPFNDGVYFASTEKSNIIRGWIFGTTLDSKTQSLLIVNNATNVVIKVCEFQFCNDPFLGVYYHKNNKSWMESEFRVYSSANNCTFEYVSQPFLMDLEGKQGNFKNLREFVFKNIDGYFKIYSKHTPINLVRDLPQGFSALEPLVDLPIGINITRFQTLLALHRSYLTPGDSSSGWTAGAAAYYVGYLQPRTFLLKYNENGTITDAVDCALDPLSETKCTLKSFTVEKGIYQTSNFRVQPTESIVRFPNITNLCPFGEVFNATRFASVYAWNRKRISNCVADYSVLYNSASFSTFKCYGVSPTKLNDLCFTNVYADSFVIRGDEVRQIAPGQTGKIADYNYKLPDDFTGCVIAWNSNNLDSKVGGNYNYLYRLFRKSNLKPFERDISTEIYQAGSTPCNGVEGFNCYFPLQSYGFQPTNGVGYQPYRVVVLSFELLHAPATVCGPKKSTNLVKNKCVNFNFNGLTGTGVLTESNKKFLPFQQFGRDIADTTDAVRDPQTLEILDITPCSFGGVSVITPGTNTSNQVAVLYQNVNCTEVPVAIHADQLTPTWRVYSTGSNVFQTRAGCLIGAEHVNNSYECDIPIGAGICASYQTQTNSPRRARSVASQSIIAYTMSLGAENSVAYSNNSIAIPTNFTISVTTEILPVSMTKTSVDCTMYICGDSTECSNLLLQYGSFCTQLNRALTGIAVEQDKNTQEVFAQVKQIYKTPPIKDFGGFNFSQILPDPSKPSKRSFIEDLLFNKVTLADAGFIKQYGDCLGDIAARDLICAQKFNGLTVLPPLLTDEMIAQYTSALLAGTITSGWTFGAGPALQIPFAMQMAYRFNGIGVTQNVLYENQKLIANQFNSAIGKIQDSLSSTPSALGKLQDVVNQNAQALNTLVKQLSSNFGAISSVLNDILSRLDKPEAEVQIDRLITGRLQSLQTYVTQQLIRAAEIRASANLAATKMSECVLGQSKRVDFCGKGYHLMSFPQSAPHGVVFLHVTYVPAQEKNFTTAPAICHDGKAHFPREGVFVSNGTHWFVTQRNFYEPQIITTDNTFVSGNCDVVIGIVNNTVYDPLQPELDSFKEELDKYFKNHTSPDVDLGDISGINASVVNIQKEIDRLNEVAKNLNESLIDLQELGKYEQYIKWPWYIWLGFIAGLIAIVMVTIMLCCMTSCCSCLKGCCSCGSCCKFDEDDSEPVLKGVKLHYT

SEQ ID NO: 218 - protein, 1273 aa, Artificial Sequence
  source: /note="Description of Artificial Sequence: Synthetic polypeptide"
MFVFLVLLPLVSSQCVNLTTRTQLPPAYTNSFTRGVYYPDKVFRSSVLHSTQDLFLPFFSNVTWFHAIHVSGTNGTKRFDNPVLPFNDGVYFASTEKSNIIRGWIFGTTLDSKTQSLLIVNNATNVVIKVCEFQFCNDPFLGVYYHKNNKSWMESEFRVYSSANNCTFEYVSQPFLMDLEGKQGNFKNLREFVFKNIDGYFKIYSKHTPINLVRDLPQGFSALEPLVDLPIGINITRFQTLLALHRSYLTPGDSSSGWTAGAAAYYVGYLQPRTFLLKYNENGTITDAVDCALDPLSETKCTLKSFTVEKGIYQTSNFRVQPTESIVRFPNITNLCPFGEVFNATRFASVYAWNRKRISNCVADYSVLYNSASFSTFKCYGVSPTKLNDLCFTNVYADSFVIRGDEVRQIAPGQTGKIADYNYKLPDDFTGCVIAWNSNNLDSKVGGNYNYLYRLFRKSNLKPFERDISTEIYQAGSTPCNGVEGFNCYFPLQSYGFQPTNGVGYQPYRVVVLSFELLHAPATVCGPKKSTNLVKNKCVNFNFNGLTGTGVLTESNKKFLPFQQFGRDIADTTDAVRDPQTLEILDITPCSFGGVSVITPGTNTSNQVAVLYQNVNCTEVPVAIHADQLTPTWRVYSTGSNVFQTRAGCLIGAEHVNNSYECDIPIGAGICASYQTQTNSPRRARSVASQSIIAYTMSLGAENSVAYSNNSIAIPTNFTISVTTEILPVSMTKTSVDCTMYICGDSTECSNLLLQYGSFCTQLNRALTGIAVEQDKNTQEVFAQVKQIYKTPPIKDFGGFNFSQILPDPSKPSKRSFIEDLLFNKVTLADAGFIKQYGDCLGDIAARDLICAQKFNGLTVLPPLLTDEMIAQYTSALLAGTITSGWTFGAGPALQIPFAMQMAYRFNGIGVTQNVLYENQKLIANQFNSAIGKIQDSLSSPPSALGKLQDVVNQNAQALNTLVKQLSSNFGAISSVLNDILSRLDKPEAEVQIDRLITGRLQSLQTYVTQQLIRAAEIRASANLAATKMSECVLGQSKRVDFCGKGYHLMSFPQSAPHGVVFLHVTYVPAQEKNFTTAPAICHDGKAHFPREGVFVSNGTHWFVTQRNFYEPQIITTDNTFVSGNCDVVIGIVNNTVYDPLQPELDSFKEELDKYFKNHTSPDVDLGDISGINASVVNIQKEIDRLNEVAKNLNESLIDLQELGKYEQYIKWPWYIWLGFIAGLIAIVMVTIMLCCMTSCCSCLKGCCSCGSCCKFDEDDSEPVLKGVKLHYT

SEQ ID NO: 219 - protein, 1273 aa, Artificial Sequence
  source: /note="Description of Artificial Sequence: Synthetic polypeptide"
MFVFLVLLPLVSSQCVNLTTRTQLPPAYTNSFTRGVYYPDKVFRSSVLHSTQDLFLPFFSNVTWFHAIHVSGTNGTKRFDNPVLPFNDGVYFASTEKSNIIRGWIFGTTLDSKTQSLLIVNNATNVVIKVCEFQFCNDPFLGVYYHKNNKSWMESEFRVYSSANNCTFEYVSQPFLMDLEGKQGNFKNLREFVFKNIDGYFKIYSKHTPINLVRDLPQGFSALEPLVDLPIGINITRFQTLLALHRSYLTPGDSSSGWTAGAAAYYVGYLQPRTFLLKYNENGTITDAVDCALDPLSETKCTLKSFTVEKGIYQTSNFRVQPTESIVRFPNITNLCPFGEVFNATRFASVYAWNRKRISNCVADYSVLYNSASFSTFKCYGVSPTKLNDLCFTNVYADSFVIRGDEVRQIAPGQTGKIADYNYKLPDDFTGCVIAWNSNNLDSKVGGNYNYLYRLFRKSNLKPFERDISTEIYQAGSTPCNGVEGFNCYFPLQSYGFQPTNGVGYQPYRVVVLSFELLHAPATVCGPKKSTNLVKNKCVNFNFNGLTGTGVLTESNKKFLPFQQFGRDIADTTDAVRDPQTLEILDITPCSFGGVSVITPGTNTSNQVAVLYQNVNCTEVPVAIHADQLTPTWRVYSTGSNVFQTRAGCLIGAEHVNNSYECDIPIGAGICASYQTQTNSPRRARSVASQSIIAYTMSLGAENSVAYSNNSIAIPTNFTISVTTEILPVSMTKTSVDCTMYICGDSTECSNLLLQYGSFCTQLNRALTGIAVEQDKNTQEVFAQVKQIYKTPPIKDFGGFNFSQILPDPSKPSKRSFIEDLLFNKVTLADAGFIKQYGDCLGDIAARDLICAQKFNGLTVLPPLLTDEMIAQYTSALLAGTITSGWTFGAGPALQIPFAMQMAYRFNGIGVTQNVLYENQKLIANQFNSAIGKIQDSLSSTPSPLGKLQDVVNQNAQALNTLVKQLSSNFGAISSVLNDILSRLDKPEAEVQIDRLITGRLQSLQTYVTQQLIRAAEIRASANLAATKMSECVLGQSKRVDFCGKGYHLMSFPQSAPHGVVFLHVTYVPAQEKNFTTAPAICHDGKAHFPREGVFVSNGTHWFVTQRNFYEPQIITTDNTFVSGNCDVVIGIVNNTVYDPLQPELDSFKEELDKYFKNHTSPDVDLGDISGINASVVNIQKEIDRLNEVAKNLNESLIDLQELGKYEQYIKWPWYIWLGFIAGLIAIVMVTIMLCCMTSCCSCLKGCCSCGSCCKFDEDDSEPVLKGVKLHYT

SEQ ID NO: 220 - protein, 1273 aa, Artificial Sequence
  source: /note="Description of Artificial Sequence: Synthetic polypeptide"
MFVFLVLLPLVSSQCVNLTTRTQLPPAYTNSFTRGVYYPDKVFRSSVLHSTQDLFLPFFSNVTWFHAIHVSGTNGTKRFDNPVLPFNDGVYFASTEKSNIIRGWIFGTTLDSKTQSLLIVNNATNVVIKVCEFQFCNDPFLGVYYHKNNKSWMESEFRVYSSANNCTFEYVSQPFLMDLEGKQGNFKNLREFVFKNIDGYFKIYSKHTPINLVRDLPQGFSALEPLVDLPIGINITRFQTLLALHRSYLTPGDSSSGWTAGAAAYYVGYLQPRTFLLKYNENGTITDAVDCALDPLSETKCTLKSFTVEKGIYQTSNFRVQPTESIVRFPNITNLCPFGEVFNATRFASVYAWNRKRISNCVADYSVLYNSASFSTFKCYGVSPTKLNDLCFTNVYADSFVIRGDEVRQIAPGQTGKIADYNYKLPDDFTGCVIAWNSNNLDSKVGGNYNYLYRLFRKSNLKPFERDISTEIYQAGSTPCNGVEGFNCYFPLQSYGFQPTNGVGYQPYRVVVLSFELLHAPATVCGPKKSTNLVKNKCVNFNFNGLTGTGVLTESNKKFLPFQQFGRDIADTTDAVRDPQTLEILDITPCSFGGVSVITPGTNTSNQVAVLYQNVNCTEVPVAIHADQLTPTWRVYSTGSNVFQTRAGCLIGAEHVNNSYECDIPIGAGICASYQTQTNSPRRARSVASQSIIAYTMSLGAENSVAYSNNSIAIPTNFTISVTTEILPVSMTKTSVDCTMYICGDSTECSNLLLQYGSFCTQLNRALTGIAVEQDKNTQEVFAQVKQIYKTPPIKDFGGFNFSQILPDPSKPSKRSFIEDLLFNKVTLADAGFIKQYGDCLGDIAARDLICAQKFNGLTVLPPLLTDEMIAQYTSALLAGTITSGWTFGAGPALQIPFAMQMAYRFNGIGVTQNVLYENQKLIANQFNSAIGKIQDSLSSPASALGKLQDVVNQNAQALNTLVKQLSSNFGAISSVLNDILSRLDKPEAEVQIDRLITGRLQSLQTYVTQQLIRAAEIRASANLAATKMSECVLGQSKRVDFCGKGYHLMSFPQSAPHGVVFLHVTYVPAQEKNFTTAPAICHDGKAHFPREGVFVSNGTHWFVTQRNFYEPQIITTDNTFVSGNCDVVIGIVNNTVYDPLQPELDSFKEELDKYFKNHTSPDVDLGDISGINASVVNIQKEIDRLNEVAKNLNESLIDLQELGKYEQYIKWPWYIWLGFIAGLIAIVMVTIMLCCMTSCCSCLKGCCSCGSCCKFDEDDSEPVLKGVKLHYT

SEQ ID NO: 221 - protein, 1273 aa, Artificial Sequence
  source: /note="Description of Artificial Sequence: Synthetic polypeptide"
MFVFLVLLPLVSSQCVNLTTRTQLPPAYTNSFTRGVYYPDKVFRSSVLHSTQDLFLPFFSNVTWFHAIHVSGTNGTKRFDNPVLPFNDGVYFASTEKSNIIRGWIFGTTLDSKTQSLLIVNNATNVVIKVCEFQFCNDPFLGVYYHKNNKSWMESEFRVYSSANNCTFEYVSQPFLMDLEGKQGNFKNLREFVFKNIDGYFKIYSKHTPINLVRDLPQGFSALEPLVDLPIGINITRFQTLLALHRSYLTPGDSSSGWTAGAAAYYVGYLQPRTFLLKYNENGTITDAVDCALDPLSETKCTLKSFTVEKGIYQTSNFRVQPTESIVRFPNITNLCPFGEVFNATRFASVYAWNRKRISNCVADYSVLYNSASFSTFKCYGVSPTKLNDLCFTNVYADSFVIRGDEVRQIAPGQTGKIADYNYKLPDDFTGCVIAWNSNNLDSKVGGNYNYLYRLFRKSNLKPFERDISTEIYQAGSTPCNGVEGFNCYFPLQSYGFQPTNGVGYQPYRVVVLSFELLHAPATVCGPKKSTNLVKNKCVNFNFNGLTGTGVLTESNKKFLPFQQFGRDIADTTDAVRDPQTLEILDITPCSFGGVSVITPGTNTSNQVAVLYQNVNCTEVPVAIHADQLTPTWRVYSTGSNVFQTRAGCLIGAEHVNNSYECDIPIGAGICASYQTQTNSPRRARSVASQSIIAYTMSLGAENSVAYSNNSIAIPTNFTISVTTEILPVSMTKTSVDCTMYICGDSTECSNLLLQYGSFCTQLNRALTGIAVEQDKNTQEVFAQVKQIYKTPPIKDFGGFNFSQILPDPSKPSKRSFIEDLLFNKVTLADAGFIKQYGDCLGDIAARDLICAQKFNGLTVLPPLLTDEMIAQYTSALLAGTITSGWTFGAGPALQIPFAMQMAYRFNGIGVTQNVLYENQKLIANQFNSAIGKIQDSLSSTASPLGKLQDVVNQNAQALNTLVKQLSSNFGAISSVLNDILSRLDKPEAEVQIDRLITGRLQSLQTYVTQQLIRAAEIRASANLAATKMSECVLGQSKRVDFCGKGYHLMSFPQSAPHGVVFLHVTYVPAQEKNFTTAPAICHDGKAHFPREGVFVSNGTHWFVTQRNFYEPQIITTDNTFVSGNCDVVIGIVNNTVYDPLQPELDSFKEELDKYFKNHTSPDVDLGDISGINASVVNIQKEIDRLNEVAKNLNESLIDLQELGKYEQYIKWPWYIWLGFIAGLIAIVMVTIMLCCMTSCCSCLKGCCSCGSCCKFDEDDSEPVLKGVKLHYT

SEQ ID NO: 222 - protein, 1273 aa, Artificial Sequence
  source: /note="Description of Artificial Sequence: Synthetic polypeptide"
MFVFLVLLPLVSSQCVNLTTRTQLPPAYTNSFTRGVYYPDKVFRSSVLHSTQDLFLPFFSNVTWFHAIHVSGTNGTKRFDNPVLPFNDGVYFASTEKSNIIRGWIFGTTLDSKTQSLLIVNNATNVVIKVCEFQFCNDPFLGVYYHKNNKSWMESEFRVYSSANNCTFEYVSQPFLMDLEGKQGNFKNLREFVFKNIDGYFKIYSKHTPINLVRDLPQGFSALEPLVDLPIGINITRFQTLLALHRSYLTPGDSSSGWTAGAAAYYVGYLQPRTFLLKYNENGTITDAVDCALDPLSETKCTLKSFTVEKGIYQTSNFRVQPTESIVRFPNITNLCPFGEVFNATRFASVYAWNRKRISNCVADYSVLYNSASFSTFKCYGVSPTKLNDLCFTNVYADSFVIRGDEVRQIAPGQTGKIADYNYKLPDDFTGCVIAWNSNNLDSKVGGNYNYLYRLFRKSNLKPFERDISTEIYQAGSTPCNGVEGFNCYFPLQSYGFQPTNGVGYQPYRVVVLSFELLHAPATVCGPKKSTNLVKNKCVNFNFNGLTGTGVLTESNKKFLPFQQFGRDIADTTDAVRDPQTLEILDITPCSFGGVSVITPGTNTSNQVAVLYQNVNCTEVPVAIHADQLTPTWRVYSTGSNVFQTRAGCLIGAEHVNNSYECDIPIGAGICASYQTQTNSPRRARSVASQSIIAYTMSLGAENSVAYSNNSIAIPTNFTISVTTEILPVSMTKTSVDCTMYICGDSTECSNLLLQYGSFCTQLNRALTGIAVEQDKNTQEVFAQVKQIYKTPPIKDFGGFNFSQILPDPSKPSKRSFIEDLLFNKVTLADAGFIKQYGDCLGDIAARDLICAQKFNGLTVLPPLLTDEMIAQYTSALLAGTITSGWTFGAGPALQIPFAMQMAYRFNGIGVTQNVLYENQKLIANQFNSAIGKIQDSLSSTPSALGKLQDVVNQNAQALNTLVKQLSSNFGAISSVLNDILSRLDPPEAEVQIDRLITGRLQSLQTYVTQQLIRAAEIRASANLAATKMSECVLGQSKRVDFCGKGYHLMSFPQSAPHGVVFLHVTYVPAQEKNFTTAPAICHDGKAHFPREGVFVSNGTHWFVTQRNFYEPQIITTDNTFVSGNCDVVIGIVNNTVYDPLQPELDSFKEELDKYFKNHTSPDVDLGDISGINASVVNIQKEIDRLNEVAKNLNESLIDLQELGKYEQYIKWPWYIWLGFIAGLIAIVMVTIMLCCMTSCCSCLKGCCSCGSCCKFDEDDSEPVLKGVKLHYT

SEQ ID NO: 223 - protein, 1273 aa, Artificial Sequence
  source: /note="Description of Artificial Sequence: Synthetic polypeptide"
MFVFLVLLPLVSSQCVNLTTRTQLPPAYTNSFTRGVYYPDKVFRSSVLHSTQDLFLPFFSNVTWFHAIHVSGTNGTKRFDNPVLPFNDGVYFASTEKSNIIRGWIFGTTLDSKTQSLLIVNNATNVVIKVCEFQFCNDPFLGVYYHKNNKSWMESEFRVYSSANNCTFEYVSQPFLMDLEGKQGNFKNLREFVFKNIDGYFKIYSKHTPINLVRDLPQGFSALEPLVDLPIGINITRFQTLLALHRSYLTPGDSSSGWTAGAAAYYVGYLQPRTFLLKYNENGTITDAVDCALDPLSETKCTLKSFTVEKGIYQTSNFRVQPTESIVRFPNITNLCPFGEVFNATRFASVYAWNRKRISNCVADYSVLYNSASFSTFKCYGVSPTKLNDLCFTNVYADSFVIRGDEVRQIAPGQTGKIADYNYKLPDDFTGCVIAWNSNNLDSKVGGNYNYLYRLFRKSNLKPFERDISTEIYQAGSTPCNGVEGFNCYFPLQSYGFQPTNGVGYQPYRVVVLSFELLHAPATVCGPKKSTNLVKNKCVNFNFNGLTGTGVLTESNKKFLPFQQFGRDIADTTDAVRDPQTLEILDITPCSFGGVSVITPGTNTSNQVAVLYQNVNCTEVPVAIHADQLTPTWRVYSTGSNVFQTRAGCLIGAEHVNNSYECDIPIGAGICASYQTQTNSPRRARSVASQSIIAYTMSLGAENSVAYSNNSIAIPTNFTISVTTEILPVSMTKTSVDCTMYICGDSTECSNLLLQYGSFCTQLNRALTGIAVEQDKNTQEVFAQVKQIYKTPPIKDFGGFNFSQILPDPSKPSKRSFIEDLLFNKVTLADAGFIKQYGDCLGDIAARDLICAQKFNGLTVLPPLLTDEMIAQYTSALLAGTITSGWTFGAGPALQIPFAMQMAYRFNGIGVTQNVLYENQKLIANQFNSAIGKIQDSLSSPPSALGKLQDVVNQNAQALNTLVKQLSSNFGAISSVLNDILSRLDPPEAEVQIDRLITGRLQSLQTYVTQQLIRAAEIRASANLAATKMSECVLGQSKRVDFCGKGYHLMSFPQSAPHGVVFLHVTYVPAQEKNFTTAPAICHDGKAHFPREGVFVSNGTHWFVTQRNFYEPQIITTDNTFVSGNCDVVIGIVNNTVYDPLQPELDSFKEELDKYFKNHTSPDVDLGDISGINASVVNIQKEIDRLNEVAKNLNESLIDLQELGKYEQYIKWPWYIWLGFIAGLIAIVMVTIMLCCMTSCCSCLKGCCSCGSCCKFDEDDSEPVLKGVKLHYT

SEQ ID NO: 224 - protein, 1273 aa, Artificial Sequence
  source: /note="Description of Artificial Sequence: Synthetic polypeptide"
MFVFLVLLPLVSSQCVNLTTRTQLPPAYTNSFTRGVYYPDKVFRSSVLHSTQDLFLPFFSNVTWFHAIHVSGTNGTKRFDNPVLPFNDGVYFASTEKSNIIRGWIFGTTLDSKTQSLLIVNNATNVVIKVCEFQFCNDPFLGVYYHKNNKSWMESEFRVYSSANNCTFEYVSQPFLMDLEGKQGNFKNLREFVFKNIDGYFKIYSKHTPINLVRDLPQGFSALEPLVDLPIGINITRFQTLLALHRSYLTPGDSSSGWTAGAAAYYVGYLQPRTFLLKYNENGTITDAVDCALDPLSETKCTLKSFTVEKGIYQTSNFRVQPTESIVRFPNITNLCPFGEVFNATRFASVYAWNRKRISNCVADYSVLYNSASFSTFKCYGVSPTKLNDLCFTNVYADSFVIRGDEVRQIAPGQTGKIADYNYKLPDDFTGCVIAWNSNNLDSKVGGNYNYLYRLFRKSNLKPFERDISTEIYQAGSTPCNGVEGFNCYFPLQSYGFQPTNGVGYQPYRVVVLSFELLHAPATVCGPKKSTNLVKNKCVNFNFNGLTGTGVLTESNKKFLPFQQFGRDIADTTDAVRDPQTLEILDITPCSFGGVSVITPGTNTSNQVAVLYQNVNCTEVPVAIHADQLTPTWRVYSTGSNVFQTRAGCLIGAEHVNNSYECDIPIGAGICASYQTQTNSPRRARSVASQSIIAYTMSLGAENSVAYSNNSIAIPTNFTISVTTEILPVSMTKTSVDCTMYICGDSTECSNLLLQYGSFCTQLNRALTGIAVEQDKNTQEVFAQVKQIYKTPPIKDFGGFNFSQILPDPSKPSKRSFIEDLLFNKVTLADAGFIKQYGDCLGDIAARDLICAQKFNGLTVLPPLLTDEMIAQYTSALLAGTITSGWTFGAGPALQIPFAMQMAYRFNGIGVTQNVLYENQKLIANQFNSAIGKIQDSLSSTPSPLGKLQDVVNQNAQALNTLVKQLSSNFGAISSVLNDILSRLDPPEAEVQIDRLITGRLQSLQTYVTQQLIRAAEIRASANLAATKMSECVLGQSKRVDFCGKGYHLMSFPQSAPHGVVFLHVTYVPAQEKNFTTAPAICHDGKAHFPREGVFVSNGTHWFVTQRNFYEPQIITTDNTFVSGNCDVVIGIVNNTVYDPLQPELDSFKEELDKYFKNHTSPDVDLGDISGINASVVNIQKEIDRLNEVAKNLNESLIDLQELGKYEQYIKWPWYIWLGFIAGLIAIVMVTIMLCCMTSCCSCLKGCCSCGSCCKFDEDDSEPVLKGVKLHYT

SEQ ID NO: 225 - protein, 1273 aa, Artificial Sequence
  source: /note="Description of Artificial Sequence: Synthetic polypeptide"
MFVFLVLLPLVSSQCVNLTTRTQLPPAYTNSFTRGVYYPDKVFRSSVLHSTQDLFLPFFSNVTWFHAIHVSGTNGTKRFDNPVLPFNDGVYFASTEKSNIIRGWIFGTTLDSKTQSLLIVNNATNVVIKVCEFQFCNDPFLGVYYHKNNKSWMESEFRVYSSANNCTFEYVSQPFLMDLEGKQGNFKNLREFVFKNIDGYFKIYSKHTPINLVRDLPQGFSALEPLVDLPIGINITRFQTLLALHRSYLTPGDSSSGWTAGAAAYYVGYLQPRTFLLKYNENGTITDAVDCALDPLSETKCTLKSFTVEKGIYQTSNFRVQPTESIVRFPNITNLCPFGEVFNATRFASVYAWNRKRISNCVADYSVLYNSASFSTFKCYGVSPTKLNDLCFTNVYADSFVIRGDEVRQIAPGQTGKIADYNYKLPDDFTGCVIAWNSNNLDSKVGGNYNYLYRLFRKSNLKPFERDISTEIYQAGSTPCNGVEGFNCYFPLQSYGFQPTNGVGYQPYRVVVLSFELLHAPATVCGPKKSTNLVKNKCVNFNFNGLTGTGVLTESNKKFLPFQQFGRDIADTTDAVRDPQTLEILDITPCSFGGVSVITPGTNTSNQVAVLYQNVNCTEVPVAIHADQLTPTWRVYSTGSNVFQTRAGCLIGAEHVNNSYECDIPIGAGICASYQTQTNSPRRARSVASQSIIAYTMSLGAENSVAYSNNSIAIPTNFTISVTTEILPVSMTKTSVDCTMYICGDSTECSNLLLQYGSFCTQLNRALTGIAVEQDKNTQEVFAQVKQIYKTPPIKDFGGFNFSQILPDPSKPSKRSFIEDLLFNKVTLADAGFIKQYGDCLGDIAARDLICAQKFNGLTVLPPLLTDEMIAQYTSALLAGTITSGWTFGAGPALQIPFAMQMAYRFNGIGVTQNVLYENQKLIANQFNSAIGKIQDSLSSPASALGKLQDVVNQNAQALNTLVKQLSSNFGAISSVLNDILSRLDPPEAEVQIDRLITGRLQSLQTYVTQQLIRAAEIRASANLAATKMSECVLGQSKRVDFCGKGYHLMSFPQSAPHGVVFLHVTYVPAQEKNFTTAPAICHDGKAHFPREGVFVSNGTHWFVTQRNFYEPQIITTDNTFVSGNCDVVIGIVNNTVYDPLQPELDSFKEELDKYFKNHTSPDVDLGDISGINASVVNIQKEIDRLNEVAKNLNESLIDLQELGKYEQYIKWPWYIWLGFIAGLIAIVMVTIMLCCMTSCCSCLKGCCSCGSCCKFDEDDSEPVLKGVKLHYT

SEQ ID NO: 226 - protein, 1273 aa, Artificial Sequence
  source: /note="Description of Artificial Sequence: Synthetic polypeptide"
MFVFLVLLPLVSSQCVNLTTRTQLPPAYTNSFTRGVYYPDKVFRSSVLHSTQDLFLPFFSNVTWFHAIHVSGTNGTKRFDNPVLPFNDGVYFASTEKSNIIRGWIFGTTLDSKTQSLLIVNNATNVVIKVCEFQFCNDPFLGVYYHKNNKSWMESEFRVYSSANNCTFEYVSQPFLMDLEGKQGNFKNLREFVFKNIDGYFKIYSKHTPINLVRDLPQGFSALEPLVDLPIGINITRFQTLLALHRSYLTPGDSSSGWTAGAAAYYVGYLQPRTFLLKYNENGTITDAVDCALDPLSETKCTLKSFTVEKGIYQTSNFRVQPTESIVRFPNITNLCPFGEVFNATRFASVYAWNRKRISNCVADYSVLYNSASFSTFKCYGVSPTKLNDLCFTNVYADSFVIRGDEVRQIAPGQTGKIADYNYKLPDDFTGCVIAWNSNNLDSKVGGNYNYLYRLFRKSNLKPFERDISTEIYQAGSTPCNGVEGFNCYFPLQSYGFQPTNGVGYQPYRVVVLSFELLHAPATVCGPKKSTNLVKNKCVNFNFNGLTGTGVLTESNKKFLPFQQFGRDIADTTDAVRDPQTLEILDITPCSFGGVSVITPGTNTSNQVAVLYQNVNCTEVPVAIHADQLTPTWRVYSTGSNVFQTRAGCLIGAEHVNNSYECDIPIGAGICASYQTQTNSPRRARSVASQSIIAYTMSLGAENSVAYSNNSIAIPTNFTISVTTEILPVSMTKTSVDCTMYICGDSTECSNLLLQYGSFCTQLNRALTGIAVEQDKNTQEVFAQVKQIYKTPPIKDFGGFNFSQILPDPSKPSKRSFIEDLLFNKVTLADAGFIKQYGDCLGDIAARDLICAQKFNGLTVLPPLLTDEMIAQYTSALLAGTITSGWTFGAGPALQIPFAMQMAYRFNGIGVTQNVLYENQKLIANQFNSAIGKIQDSLSSTASPLGKLQDVVNQNAQALNTLVKQLSSNFGAISSVLNDILSRLDPPEAEVQIDRLITGRLQSLQTYVTQQLIRAAEIRASANLAATKMSECVLGQSKRVDFCGKGYHLMSFPQSAPHGVVFLHVTYVPAQEKNFTTAPAICHDGKAHFPREGVFVSNGTHWFVTQRNFYEPQIITTDNTFVSGNCDVVIGIVNNTVYDPLQPELDSFKEELDKYFKNHTSPDVDLGDISGINASVVNIQKEIDRLNEVAKNLNESLIDLQELGKYEQYIKWPWYIWLGFIAGLIAIVMVTIMLCCMTSCCSCLKGCCSCGSCCKFDEDDSEPVLKGVKLHYT

SEQ ID NO: 227 - protein, 1273 aa, Artificial Sequence
  source: /note="Description of Artificial Sequence: Synthetic polypeptide"
MFVFLVLLPLVSSQCVNLTTRTQLPPAYTNSFTRGVYYPDKVFRSSVLHSTQDLFLPFFSNVTWFHAIHVSGTNGTKRFDNPVLPFNDGVYFASTEKSNIIRGWIFGTTLDSKTQSLLIVNNATNVVIKVCEFQFCNDPFLGVYYHKNNKSWMESEFRVYSSANNCTFEYVSQPFLMDLEGKQGNFKNLREFVFKNIDGYFKIYSKHTPINLVRDLPQGFSALEPLVDLPIGINITRFQTLLALHRSYLTPGDSSSGWTAGAAAYYVGYLQPRTFLLKYNENGTITDAVDCALDPLSETKCTLKSFTVEKGIYQTSNFRVQPTESIVRFPNITNLCPFGEVFNATRFASVYAWNRKRISNCVADYSVLYNSASFSTFKCYGVSPTKLNDLCFTNVYADSFVIRGDEVRQIAPGQTGKIADYNYKLPDDFTGCVIAWNSNNLDSKVGGNYNYLYRLFRKSNLKPFERDISTEIYQAGSTPCNGVEGFNCYFPLQSYGFQPTNGVGYQPYRVVVLSFELLHAPATVCGPKKSTNLVKNKCVNFNFNGLTGTGVLTESNKKFLPFQQFGRDIADTTDAVRDPQTLEILDITPCSFGGVSVITPGTNTSNQVAVLYQDVNCTEVPVAIHADQLTPTWRVYSTGSNVFQTRAGCLIGAEHVNNSYECDIPIGAGICASYQTQTNSPRRARSVASQSIIAYTMSLGAENSVAYSNNSIAIPTNFTISVTTEILPVSMTKTSVDCTMYICGDSTECSNLLLQYGSFCTQLNRALTGIAVEQDKNTQEVFAQVKQIYKTPPIKDFGGFNFSQILPDPSKPSKRSFIEDLLFNKVTLADAGFIKQYGDCLGDIAARDLICAQKFNGLTVLPPLLTDEMIAQYTSALLAGTITSGWTFGAGAALQIPFAMQMAYRFNGIGVTQNVLYENQKLIANQFNSAIGKIQDSLSSTPSALGKLQDVVNQNAQALNTLVKQLSSNFGAISSVLNDILSRLDKVEAEVQIDRLITGRLQSLQTYVTQQLIRAAEIRASANLAATKMSECVLGQSKRVDFCGKGYHLMSFPQSAPHGVVFLHVTYVPAQEKNFTTAPAICHDGKAHFPREGVFVSNGTHWFVTQRNFYEPQIITTDNTFVSGNCDVVIGIVNNTVYDPLQPELDSFKEELDKYFKNHTSPDVDLGDISGINASVVNIQKEIDRLNEVAKNLNESLIDLQELGKYEQYIKWPWYIWLGFIAGLIAIVMVTIMLCCMTSCCSCLKGCCSCGSCCKFDEDDSEPVLKGVKLHYT

SEQ ID NO: 228 - protein, 1273 aa, Artificial Sequence
  source: /note="Description of Artificial Sequence: Synthetic polypeptide"
MFVFLVLLPLVSSQCVNLTTRTQLPPAYTNSFTRGVYYPDKVFRSSVLHSTQDLFLPFFSNVTWFHAIHVSGTNGTKRFDNPVLPFNDGVYFASTEKSNIIRGWIFGTTLDSKTQSLLIVNNATNVVIKVCEFQFCNDPFLGVYYHKNNKSWMESEFRVYSSANNCTFEYVSQPFLMDLEGKQGNFKNLREFVFKNIDGYFKIYSKHTPINLVRDLPQGFSALEPLVDLPIGINITRFQTLLALHRSYLTPGDSSSGWTAGAAAYYVGYLQPRTFLLKYNENGTITDAVDCALDPLSETKCTLKSFTVEKGIYQTSNFRVQPTESIVRFPNITNLCPFGEVFNATRFASVYAWNRKRISNCVADYSVLYNSASFSTFKCYGVSPTKLNDLCFTNVYADSFVIRGDEVRQIAPGQTGKIADYNYKLPDDFTGCVIAWNSNNLDSKVGGNYNYLYRLFRKSNLKPFERDISTEIYQAGSTPCNGVEGFNCYFPLQSYGFQPTNGVGYQPYRVVVLSFELLHAPATVCGPKKSTNLVKNKCVNFNFNGLTGTGVLTESNKKFLPFQQFGRDIADTTDAVRDPQTLEILDITPCSFGGVSVITPGTNTSNQVAVLYQDVNCTEVPVAIHADQLTPTWRVYSTGSNVFQTRAGCLIGAEHVNNSYECDIPIGAGICASYQTQTNSPRRARSVASQSIIAYTMSLGAENSVAYSNNSIAIPTNFTISVTTEILPVSMTKTSVDCTMYICGDSTECSNLLLQYGSFCTQLNRALTGIAVEQDKNTQEVFAQVKQIYKTPPIKDFGGFNFSQILPDPSKPSKRSFIEDLLFNKVTLADAGFIKQYGDCLGDIAARDLICAQKFNGLTVLPPLLTDEMIAQYTSALLAGTITSGWTFGAGPALQIPFAMQMAYRFNGIGVTQNVLYENQKLIANQFNSAIGKIQDSLSSTASALGKLQDVVNQNAQALNTLVKQLSSNFGAISSVLNDILSRLDKVEAEVQIDRLITGRLQSLQTYVTQQLIRAAEIRASANLAATKMSECVLGQSKRVDFCGKGYHLMSFPQSAPHGVVFLHVTYVPAQEKNFTTAPAICHDGKAHFPREGVFVSNGTHWFVTQRNFYEPQIITTDNTFVSGNCDVVIGIVNNTVYDPLQPELDSFKEELDKYFKNHTSPDVDLGDISGINASVVNIQKEIDRLNEVAKNLNESLIDLQELGKYEQYIKWPWYIWLGFIAGLIAIVMVTIMLCCMTSCCSCLKGCCSCGSCCKFDEDDSEPVLKGVKLHYT

SEQ ID NO: 229 - protein, 1273 aa, Artificial Sequence
  source: /note="Description of Artificial Sequence: Synthetic polypeptide"
MFVFLVLLPLVSSQCVNLTTRTQLPPAYTNSFTRGVYYPDKVFRSSVLHSTQDLFLPFFSNVTWFHAIHVSGTNGTKRFDNPVLPFNDGVYFASTEKSNIIRGWIFGTTLDSKTQSLLIVNNATNVVIKVCEFQFCNDPFLGVYYHKNNKSWMESEFRVYSSANNCTFEYVSQPFLMDLEGKQGNFKNLREFVFKNIDGYFKIYSKHTPINLVRDLPQGFSALEPLVDLPIGINITRFQTLLALHRSYLTPGDSSSGWTAGAAAYYVGYLQPRTFLLKYNENGTITDAVDCALDPLSETKCTLKSFTVEKGIYQTSNFRVQPTESIVRFPNITNLCPFGEVFNATRFASVYAWNRKRISNCVADYSVLYNSASFSTFKCYGVSPTKLNDLCFTNVYADSFVIRGDEVRQIAPGQTGKIADYNYKLPDDFTGCVIAWNSNNLDSKVGGNYNYLYRLFRKSNLKPFERDISTEIYQAGSTPCNGVEGFNCYFPLQSYGFQPTNGVGYQPYRVVVLSFELLHAPATVCGPKKSTNLVKNKCVNFNFNGLTGTGVLTESNKKFLPFQQFGRDIADTTDAVRDPQTLEILDITPCSFGGVSVITPGTNTSNQVAVLYQNVNCTEVPVAIHADQLTPTWRVYSTGSNVFQTRAGCLIGAEHVNNSYECDIPIGAGICASYQTQTNSPRRARSVASQSIIAYTMSLGAENSVAYSNNSIAIPTNFTISVTTEILPVSMTKTSVDCTMYICGDSTECSNLLLQYGSFCTQLNRALTGIAVEQDKNTQEVFAQVKQIYKTPPIKDFGGFNFSQILPDPSKPSKRSFIEDLLFNKVTLADAGFIKQYGDCLGDIAARDLICAQKFNGLTVLPPLLTDEMIAQYTSALLAGTITSGWTFGAGAALQIPFAMQMAYRFNGIGVTQNVLYENQKLIANQFNSAIGKIQDSLSSTASALGKLQDVVNQNAQALNTLVKQLSSNFGAISSVLNDILSRLDKVEAEVQIDRLITGRLQSLQTYVTQQLIRAAEIRASANLAATKMSECVLGQSKRVDFCGKGYHLMSFPQSAPHGVVFLHVTYVPAQEKNFTTAPAICHDGKAHFPREGVFVSNGTHWFVTQRNFYEPQIITTDNTFVSGNCDVVIGIVNNTVYDPLQPELDSFKEELDKYFKNHTSPDVDLGDISGINASVVNIQKEIDRLNEVAKNLNESLIDLQELGKYEQYIKWPWYIWLGFIAGLIAIVMVTIMLCCMTSCCSCLKGCCSCGSCCKFDEDDSEPVLKGVKLHYT

SEQ ID NO: 230 - protein, 1273 aa, Artificial Sequence
  source: /note="Description of Artificial Sequence: Synthetic polypeptide"
MFVFLVLLPLVSSQCVNLTTRTQLPPAYTNSFTRGVYYPDKVFRSSVLHSTQDLFLPFFSNVTWFHAIHVSGTNGTKRFDNPVLPFNDGVYFASTEKSNIIRGWIFGTTLDSKTQSLLIVNNATNVVIKVCEFQFCNDPFLGVYYHKNNKSWMESEFRVYSSANNCTFEYVSQPFLMDLEGKQGNFKNLREFVFKNIDGYFKIYSKHTPINLVRDLPQGFSALEPLVDLPIGINITRFQTLLALHRSYLTPGDSSSGWTAGAAAYYVGYLQPRTFLLKYNENGTITDAVDCALDPLSETKCTLKSFTVEKGIYQTSNFRVQPTESIVRFPNITNLCPFGEVFNATRFASVYAWNRKRISNCVADYSVLYNSASFSTFKCYGVSPTKLNDLCFTNVYADSFVIRGDEVRQIAPGQTGKIADYNYKLPDDFTGCVIAWNSNNLDSKVGGNYNYLYRLFRKSNLKPFERDISTEIYQAGSTPCNGVEGFNCYFPLQSYGFQPTNGVGYQPYRVVVLSFELLHAPATVCGPKKSTNLVKNKCVNFNFNGLTGTGVLTESNKKFLPFQQFGRDIADITDAVRDPQTLEILDITPCSFGGVSVITPGTNTSNQVAVLYQDVNCTEVPVAIHADQLTPTWRVYSTGSNVFQTRAGCLIGAEHVNNSYECDIPIGAGICASYQTQTNSPRRARSVASQSIIAYTMSLGAENSVAYSNNSIAIPTNFTISVTTEILPVSMTKTSVDCTMYICGDSTECSNLLLQYGSFCTQLNRALTGIAVEQDKNTQEVFAQVKQIYKTPPIKDFGGFNFSQILPDPSKPSKRSFIEDLLFNKVTLADAGFIKQYGDCLGDIAARDLICAQKFNGLTVLPPLLTDEMIAQYTSALLAGTITSGWTFGAGAALQIPFAMQMAYRFNGIGVTQNVLYENQKLIANQFNSAIGKIQDSLSSTASALGKLQDVVNQNAQALNTLVKQLSSNFGAISSVLNDILSRLDKVEAEVQIDRLITGRLQSLQTYVTQQLIRAAEIRASANLAATKMSECVLGQSKRVDFCGKGYHLMSFPQSAPHGVVFLHVTYVPAQEKNFTTAPAICHDGKAHFPREGVFVSNGTHWFVTQRNFYEPQIITTDNTFVSGNCDVVIGIVNNTVYDPLQPELDSFKEELDKYFKNHTSPDVDLGDISGINASVVNIQKEIDRLNEVAKNLNESLIDLQELGKYEQYIKWPWYIWLGFIAGLIAIVMVTIMLCCMTSCCSCLKGCCSCGSCCKFDEDDSEPVLKGVKLHYT

SEQ ID NO: 231 - protein, 1273 aa, Artificial Sequence
  source: /note="Description of Artificial Sequence: Synthetic polypeptide"
MFVFLVLLPLVSSQCVNLTTRTQLPPAYTNSFTRGVYYPDKVFRSSVLHSTQDLFLPFFSNVTWFHAIHVSGTNGTKRFDNPVLPFNDGVYFASTEKSNIIRGWIFGTTLDSKTQSLLIVNNATNVVIKVCEFQFCNDPFLGVYYHKNNKSWMESEFRVYSSANNCTFEYVSQPFLMDLEGKQGNFKNLREFVFKNIDGYFKIYSKHTPINLVRDLPQGFSALEPLVDLPIGINITRFQTLLALHRSYLTPGDSSSGWTAGAAAYYVGYLQPRTFLLKYNENGTITDAVDCALDPLSETKCTLKSFTVEKGIYQTSNFRVQPTESIVRFPNITNLCPFGEVFNATRFASVYAWNRKRISNCVADYSVLYNSASFSTFKCYGVSPTKLNDLCFTNVYADSFVIRGDEVRQIAPGQTGKIADYNYKLPDDFTGCVIAWNSNNLDSKVGGNYNYLYRLFRKSNLKPFERDISTEIYQAGSTPCNGVEGFNCYFPLQSYGFQPTNGVGYQPYRVVVLSFELLHAPATVCGPKKSTPLVKNKCVNFNFNGLTGTGVLTESNKKFLPFQQFGRDIADTTDAVRDPQTLEILDITPCSFGGVSVITPGTNTSNQVAVLYQDVNCTEVPVAIHADQLTPTWRVYSTGSNVFQTRAGCLIGAEHVNNSYECDIPIGAGICASYQTQTNSPRRARSVASQSIIAYTMSLGAENSVAYSNNSIAIPTNFTISVTTEILPVSMTKTSVDCTMYICGDSTECSNLLLQYGSFCTQLNRALTGIAVEQDKNTQEVFAQVKQIYKTPPIKDFGGFNFSQILPDPSKPSKRSFIEDLLFNKVTLADAGFIKQYGDCLGDIAARDLICAQKFNGLTVLPPLLTDEMIAQYTSALLAGTITSGWTFGAGAALQIPFAMQMAYRFNGIGVTQNVLYENQKLIANQFNSAIGKIQDSLSSTASALGKLQDVVNQNAQALNTLVKQLSSNFGAISSVLNDILSRLDKVEAEVQIDRLITGRLQSLQTYVTQQLIRAAEIRASANLAATKMSECVLGQSKRVDFCGKGYHLMSFPQSAPHGVVFLHVTYVPAQEKNFTTAPAICHDGKAHFPREGVFVSNGTHWFVTQRNFYEPQIITTDNTFVSGNCDVVIGIVNNTVYDPLQPELDSFKEELDKYFKNHTSPDVDLGDISGINASVVNIQKEIDRLNEVAKNLNESLIDLQELGKYEQYIKWPWYIWLGFIAGLIAIVMVTIMLCCMTSCCSCLKGCCSCGSCCKFDEDDSEPVLKGVKLHYT

SEQ ID NO: 232 - protein, 1273 aa, Artificial Sequence
  source: /note="Description of Artificial Sequence: Synthetic polypeptide"
MFVFLVLLPLVSSQCVNLTTRTQLPPAYTNSFTRGVYYPDKVFRSSVLHSTQDLFLPFFSNVTWFHAIHVSGTNGTKRFDNPVLPFNDGVYFASTEKSNIIRGWIFGTTLDSKTQSLLIVNNATNVVIKVCEFQFCNDPFLGVYYHKNNKSWMESEFRVYSSANNCTFEYVSQPFLMDLEGKQGNFKNLREFVFKNIDGYFKIYSKHTPINLVRDLPQGFSALEPLVDLPIGINITRFQTLLALHRSYLTPGDSSSGWTAGAAAYYVGYLQPRTFLLKYNENGTITDAVDCALDPLSETKCTLKSFTVEKGIYQTSNFRVQPTESIVRFPNITNLCPFGEVFNATRFASVYAWNRKRISNCVADYSVLYNSASFSTFKCYGVSPTKLNDLCFTNVYADSFVIRGDEVRQIAPGQTGKIADYNYKLPDDFTGCVIAWNSNNLDSKVGGNYNYLYRLFRKSNLKPFERDISTEIYQAGSTPCNGVEGFNCYFPLQSYGFQPTNGVGYQPYRVVVLSFELLHAPATVCGPKKSTNLVKNKCVNFNFNGLTGTGVLTESNKKFLPFQQFGRDIADTTDAVRDPQTLEILDITPCSFGGVSVITPGTNTSNQVAVLYQDVNCTEVPVAIHADQLTPTWRVYSTGSNVFQTRAGCLIGAEHVNNSYECDIPIGAGICASYQTQTNSPRRARSVASQSIIAYTMSLGAENSVAYSNNSIAIPTNFTISVTTEILPVSMTKTSVDCTMYICGDSTECSNLLLQYGSFCTQLNRALTGIAVEQDKNTQEVFAQVKQIYKTPPIKDFGGFNFSQILPDPSKPSKRSFIEDLLFNKVTLADAGFIKQYGDCLGDIAARDLICAQKFNGLTVLPPLLTDEMIAQYTSALLACTITSGWTCGAGAALQIPFAMQMAYRFNGIGVTQNVLYENQKLIANQFNSAIGKIQDSLSSTASALGKLQDVVNQNAQALNTLVKQLSSNFGAISSVLNDILSRLDKVEAEVQIDRLITGRLQSLQTYVTQQLIRAAEIRASANLAATKMSECVLGQSKRVDFCGKGYHLMSFPQSAPHGVVFLHVTYVPAQEKNFTTAPAICHDGKAHFPREGVFVSNGTHWFVTQRNFYEPQIITTDNTFVSGNCDVVIGIVNNTVYDPLQPELDSFKEELDKYFKNHTSPDVDLGDISGINASVVNIQKEIDRLNEVAKNLNESLIDLQELGKYEQYIKWPWYIWLGFIAGLIAIVMVTIMLCCMTSCCSCLKGCCSCGSCCKFDEDDSEPVLKGVKLHYT

SEQ ID NO: 233 - protein, 1273 aa, Artificial Sequence
  source: /note="Description of Artificial Sequence: Synthetic polypeptide"
MFVFLVLLPLVSSQCVNLTTRTQLPPAYTNSFTRGVYYPDKVFRSSVLHSTQDLFLPFFSNVTWFHAIHVSGTNGTKRFDNPVLPFNDGVYFASTEKSNIIRGWIFGTTLDSKTQSLLIVNNATNVVIKVCEFQFCNDPFLGVYYHKNNKSWMESEFRVYSSANNCTFEYVSQPFLMDLEGKQGNFKNLREFVFKNIDGYFKIYSKHTPINLVRDLPQGFSALEPLVDLPIGINITRFQTLLALHRSYLTPGDSSSGWTAGAAAYYVGYLQPRTFLLKYNENGTITDAVDCALDPLSETKCTLKSFTVEKGIYQTSNFRVQPTESIVRFPNITNLCPFGEVFNATRFASVYAWNRKRISNCVADYSVLYNSASFSTFKCYGVSPTKLNDLCFTNVYADSFVIRGDEVRQIAPGQTGKIADYNYKLPDDFTGCVIAWNSNNLDSKVGGNYNYLYRLFRKSNLKPFERDISTEIYQAGSTPCNGVEGFNCYFPLQSYGFQPTNGVGYQPYRVVVLSFELLHAPATVCGPKKSTNLVKNKCVNFNFNGLTGTGVLTESNKKFLPFQQFGRDIADTTDAVRDPQTLEILDITPCSFGGVSVITPGTNTSNQVAVLYQDVNCTEVPVAIHADQLTPTWRVYSTGSNVFQTRAGCLIGAEHVNNSYECDIPIGAGICASYQTQTNSPRRARSVASQSIIAYTMSLGAENSVAYSNNSIAIPTNFTISVTTEILPVSMTKTSVDCTMYICGDSTECSNLLLQYGSFCTQLNRALTGIAVEQDKNTQEVFAQVKQIYKTPPIKDFGGFNFSQILPDPSKPSKRSFIEDLLFNKVTLADAGFIKQYGDCLGDIAARDLICAQKFNGLTVLPPLLTDEMIAQYTSALLAGTITCGWTFGAGACLQIPFAMQMAYRFNGIGVTQNVLYENQKLIANQFNSAIGKIQDSLSSTASALGKLQDVVNQNAQALNTLVKQLSSNFGAISSVLNDILSRLDKVEAEVQIDRLITGRLQSLQTYVTQQLIRAAEIRASANLAATKMSECVLGQSKRVDFCGKGYHLMSFPQSAPHGVVFLHVTYVPAQEKNFTTAPAICHDGKAHFPREGVFVSNGTHWFVTQRNFYEPQIITTDNTFVSGNCDVVIGIVNNTVYDPLQPELDSFKEELDKYFKNHTSPDVDLGDISGINASVVNIQKEIDRLNEVAKNLNESLIDLQELGKYEQYIKWPWYIWLGFIAGLIAIVMVTIMLCCMTSCCSCLKGCCSCGSCCKFDEDDSEPVLKGVKLHYT

SEQ ID NO: 234 - protein, 1273 aa, Artificial Sequence
  source: /note="Description of Artificial Sequence: Synthetic polypeptide"
MFVFLVLLPLVSSQCVNLTTRTQLPPAYTNSFTRGVYYPDKVFRSSVLHSTQDLFLPFFSNVTWFHAIHVSGTNGTKRFDNPVLPFNDGVYFASTEKSNIIRGWIFGTTLDSKTQSLLIVNNATNVVIKVCEFQFCNDPFLGVYYHKNNKSWMESEFRVYSSANNCTFEYVSQPFLMDLEGKQGNFKNLREFVFKNIDGYFKIYSKHTPINLVRDLPQGFSALEPLVDLPIGINITRFQTLLALHRSYLTPGDSSSGWTAGAAAYYVGYLQPRTFLLKYNENGTITDAVDCALDPLSETKCTLKSFTVEKGIYQTSNFRVQPTESIVRFPNITNLCPFGEVFNATRFASVYAWNRKRISNCVADYSVLYNSASFSTFKCYGVSPTKLNDLCFTNVYADSFVIRGDEVRQIAPGQTGKIADYNYKLPDDFTGCVIAWNSNNLDSKVGGNYNYLYRLFRKSNLKPFERDISTEIYQAGSTPCNGVEGFNCYFPLQSYGFQPTNGVGYQPYRVVVLSFELLHAPATVCGPKKSTNLVKNKCVNFNFNGLTGTGVLTESNKKFLPFQQFGRDIADTTDAVRDPQTLEILDITPCSFGGVSVITPGTNTSNQVAVLYQDVNCTEVPVAIHADQLTPTWRVYSTGSNVFQTRAGCLIGAEHVNNSYECDIPIGAGICASYQTQTNSPRRARSVASQSIIAYTMSLGAENSVAYSNNSIAIPTNFTISVTTEILPVSMTKTSVDCTMYICGDSTECSNLLLQYGSFCTQLNRALTGIAVEQDKNTQEVFAQVKQIYKTPPIKDFGGFNFSQILPDPSKPSKRSFIEDLLFNKVTLADAGFIKQYGDCLGDIAARDLICAQKFNGLTVLPPLLTDEMIAQYTSALLAGTITSGWTFGAGPALQIPFAMQMAYRFNGIGVTQNVLYENQKLIANQFNSAIGKIQDSLSSTPSALGKLQDVVNQNAQALNTLVKQLSSNFGAISSVLNDILSRLDKVEAEVQIDRLITGRLQSLQTYVTQQLIRAAEIRASANLAATKMSECVLGQSKRVDFCGKGYHLMSFPQSAPHGVVFLHVTYVPAQEKNFTTAPAICHDGKAHFPREGVFVSNGTHWFVTQRNFYEPQIITTDNTFVSGNCDVVIGIVNNTVYDPLQPELDSFKEELDKYFKNHTSPDVDLGDISGINASVVNIQKEIDRLNEVAKNLNESLIDLQELGKYEQYIKWPWYIWLGFIAGLIAIVMVTIMLCCMTSCCSCLKGCCSCGSCCKFDEDDSEPVLKGVKLHYT

SEQ ID NO: 235 - protein, 1273 aa, Artificial Sequence
  source: /note="Description of Artificial Sequence: Synthetic polypeptide"
MFVFLVLLPLVSSQCVNLTTRTQLPPAYTNSFTRGVYYPDKVFRSSVLHSTQDLFLPFFSNVTWFHAIHVSGTNGTKRFDNPVLPFNDGVYFASTEKSNIIRGWIFGTTLDSKTQSLLIVNNATNVVIKVCEFQFCNDPFLGVYYHKNNKSWMESEFRVYSSANNCTFEYVSQPFLMDLEGKQGNFKNLREFVFKNIDGYFKIYSKHTPINLVRDLPQGFSALEPLVDLPIGINITRFQTLLALHRSYLTPGDSSSGWTAGAAAYYVGYLQPRTFLLKYNENGTITDAVDCALDPLSETKCTLKSFTVEKGIYQTSNFRVQPTESIVRFPNITNLCPFGEVFNATRFASVYAWNRKRISNCVADYSVLYNSASFSTFKCYGVSPTKLNDLCFTNVYADSFVIRGDEVRQIAPGQTGKIADYNYKLPDDFTGCVIAWNSNNLDSKVGGNYNYLYRLFRKSNLKPFERDISTEIYQAGSTPCNGVEGFNCYFPLQSYGFQPTNGVGYQPYRVVVLSFELLHAPATVCGPKKSTNLVKNKCVNFNFNGLTGTGVLTESNKKFLPFQQFGRDIADTTDAVRDPQTLEILDITPCSFGGVSVITPGTNTSNQVAVLYQNVNCTEVPVAIHADQLTPTWRVYSTGSNVFQTRAGCLIGAEHVNNSYECDIPIGAGICASYQTQTNSPRRARSVASQSIIAYTMSLGAENSVAYSNNSIAIPTNFTISVTTEILPVSMTKTSVDCTMYICGDSTECSNLLLQYGSFCTQLNRALTGIAVEQDKNTQEVFAQVKQIYKTPPIKDFGGFNFSQILPDPSKPSKRSFIEDLLFNKVTLADAGFIKQYGDCLGDIAARDLICAQKFNGLTVLPPLLTDEMIAQYTSALLAGTITSGWTFGAGAALQIPFAMQMAYRFNGIGVTQNVLYENQKLIANQFNSAIGKIQDSLSSTPSALGKLQDVVNQNAQALNTLVKQLSSNFGAISSVLNDILSRLDKVEAEVQIDRLITGRLQSLQTYVTQQLIRAAEIRASANLAATKMSECVLGQSKRVDFCGKGYHLMSFPQSAPHGVVFLHVTYVPAQEKNFTTAPAICHDGKAHFPREGVFVSNGTHWFVTQRNFYEPQIITTDNTFVSGNCDVVIGIVNNTVYDPLQPELDSFKEELDKYFKNHTSPDVDLGDISGINASVVNIQKEIDRLNEVAKNLNESLIDLQELGKYEQYIKWPWYIWLGFIAGLIAIVMVTIMLCCMTSCCSCLKGCCSCGSCCKFDEDDSEPVLKGVKLHYT

SEQ ID NO: 236 - protein, 1273 aa, Artificial Sequence
  source: /note="Description of Artificial Sequence: Synthetic polypeptide"
MFVFLVLLPLVSSQCVNLTTRTQLPPAYTNSFTRGVYYPDKVFRSSVLHSTQDLFLPFFSNVTWFHAIHVSGTNGTKRFDNPVLPFNDGVYFASTEKSNIIRGWIFGTTLDSKTQSLLIVNNATNVVIKVCEFQFCNDPFLGVYYHKNNKSWMESEFRVYSSANNCTFEYVSQPFLMDLEGKQGNFKNLREFVFKNIDGYFKIYSKHTPINLVRDLPQGFSALEPLVDLPIGINITRFQTLLALHRSYLTPGDSSSGWTAGAAAYYVGYLQPRTFLLKYNENGTITDAVDCALDPLSETKCTLKSFTVEKGIYQTSNFRVQPTESIVRFPNITNLCPFGEVFNATRFASVYAWNRKRISNCVADYSVLYNSASFSTFKCYGVSPTKLNDLCFTNVYADSFVIRGDEVRQIAPGQTGKIADYNYKLPDDFTGCVIAWNSNNLDSKVGGNYNYLYRLFRKSNLKPFERDISTEIYQAGSTPCNGVEGFNCYFPLQSYGFQPTNGVGYQPYRVVVLSFELLHAPATVCGPKKSTNLVKNKCVNFNFNGLTGTGVLTESNKKFLPFQQFGRDIADITDAVRDPQTLEILDITPCSFGGVSVITPGTNTSNQVAVLYQDVNCTEVPVAIHADQLTPTWRVYSTGSNVFQTRAGCLIGAEHVNNSYECDIPIGAGICASYQTQTNSPRRARSVASQSIIAYTMSLGAENSVAYSNNSIAIPTNFTISVTTEILPVSMTKTSVDCTMYICGDSTECSNLLLQYGSFCTQLNRALTGIAVEQDKNTQEVFAQVKQIYKTPPIKDFGGFNFSQILPDPSKPSKRSFIEDLLFNKVTLADAGFIKQYGDCLGDIAARDLICAQKFNGLTVLPPLLTDEMIAQYTSALLAGTITSGWTFGAGAALQIPFAMQMAYRFNGIGVTQNVLYENQKLIANQFNSAIGKIQDSLSSTPSALGKLQDVVNQNAQALNTLVKQLSSNFGAISSVLNDILSRLDKVEAEVQIDRLITGRLQSLQTYVTQQLIRAAEIRASANLAATKMSECVLGQSKRVDFCGKGYHLMSFPQSAPHGVVFLHVTYVPAQEKNFTTAPAICHDGKAHFPREGVFVSNGTHWFVTQRNFYEPQIITTDNTFVSGNCDVVIGIVNNTVYDPLQPELDSFKEELDKYFKNHTSPDVDLGDISGINASVVNIQKEIDRLNEVAKNLNESLIDLQELGKYEQYIKWPWYIWLGFIAGLIAIVMVTIMLCCMTSCCSCLKGCCSCGSCCKFDEDDSEPVLKGVKLHYT

SEQ ID NO: 237 - protein, 1273 aa, Artificial Sequence
  source: /note="Description of Artificial Sequence: Synthetic polypeptide"
MFVFLVLLPLVSSQCVNLTTRTQLPPAYTNSFTRGVYYPDKVFRSSVLHSTQDLFLPFFSNVTWFHAIHVSGTNGTKRFDNPVLPFNDGVYFASTEKSNIIRGWIFGTTLDSKTQSLLIVNNATNVVIKVCEFQFCNDPFLGVYYHKNNKSWMESEFRVYSSANNCTFEYVSQPFLMDLEGKQGNFKNLREFVFKNIDGYFKIYSKHTPINLVRDLPQGFSALEPLVDLPIGINITRFQTLLALHRSYLTPGDSSSGWTAGAAAYYVGYLQPRTFLLKYNENGTITDAVDCALDPLSETKCTLKSFTVEKGIYQTSNFRVQPTESIVRFPNITNLCPFGEVFNATRFASVYAWNRKRISNCVADYSVLYNSASFSTFKCYGVSPTKLNDLCFTNVYADSFVIRGDEVRQIAPGQTGKIADYNYKLPDDFTGCVIAWNSNNLDSKVGGNYNYLYRLFRKSNLKPFERDISTEIYQAGSTPCNGVEGFNCYFPLQSYGFQPTNGVGYQPYRVVVLSFELLHAPATVCGPKKSTPLVKNKCVNFNFNGLTGTGVLTESNKKFLPFQQFGRDIADTTDAVRDPQTLEILDITPCSFGGVSVITPGTNTSNQVAVLYQDVNCTEVPVAIHADQLTPTWRVYSTGSNVFQTRAGCLIGAEHVNNSYECDIPIGAGICASYQTQTNSPRRARSVASQSIIAYTMSLGAENSVAYSNNSIAIPTNFTISVTTEILPVSMTKTSVDCTMYICGDSTECSNLLLQYGSFCTQLNRALTGIAVEQDKNTQEVFAQVKQIYKTPPIKDFGGFNFSQILPDPSKPSKRSFIEDLLFNKVTLADAGFIKQYGDCLGDIAARDLICAQKFNGLTVLPPLLTDEMIAQYTSALLAGTITSGWTFGAGAALQIPFAMQMAYRFNGIGVTQNVLYENQKLIANQFNSAIGKIQDSLSSTPSALGKLQDVVNQNAQALNTLVKQLSSNFGAISSVLNDILSRLDKVEAEVQIDRLITGRLQSLQTYVTQQLIRAAEIRASANLAATKMSECVLGQSKRVDFCGKGYHLMSFPQSAPHGVVFLHVTYVPAQEKNFTTAPAICHDGKAHFPREGVFVSNGTHWFVTQRNFYEPQIITTDNTFVSGNCDVVIGIVNNTVYDPLQPELDSFKEELDKYFKNHTSPDVDLGDISGINASVVNIQKEIDRLNEVAKNLNESLIDLQELGKYEQYIKWPWYIWLGFIAGLIAIVMVTIMLCCMTSCCSCLKGCCSCGSCCKFDEDDSEPVLKGVKLHYT

SEQ ID NO: 238 - protein, 1273 aa, Artificial Sequence
  source: /note="Description of Artificial Sequence: Synthetic polypeptide"
MFVFLVLLPLVSSQCVNLTTRTQLPPAYTNSFTRGVYYPDKVFRSSVLHSTQDLFLPFFSNVTWFHAIHVSGTNGTKRFDNPVLPFNDGVYFASTEKSNIIRGWIFGTTLDSKTQSLLIVNNATNVVIKVCEFQFCNDPFLGVYYHKNNKSWMESEFRVYSSANNCTFEYVSQPFLMDLEGKQGNFKNLREFVFKNIDGYFKIYSKHTPINLVRDLPQGFSALEPLVDLPIGINITRFQTLLALHRSYLTPGDSSSGWTAGAAAYYVGYLQPRTFLLKYNENGTITDAVDCALDPLSETKCTLKSFTVEKGIYQTSNFRVQPTESIVRFPNITNLCPFGEVFNATRFASVYAWNRKRISNCVADYSVLYNSASFSTFKCYGVSPTKLNDLCFTNVYADSFVIRGDEVRQIAPGQTGKIADYNYKLPDDFTGCVIAWNSNNLDSKVGGNYNYLYRLFRKSNLKPFERDISTEIYQAGSTPCNGVEGFNCYFPLQSYGFQPTNGVGYQPYRVVVLSFELLHAPATVCGPKKSTNLVKNKCVNFNFNGLTGTGVLTESNKKFLPFQQFGRDIADTTDAVRDPQTLEILDITPCSFGGVSVITPGTNTSNQVAVLYQDVNCTEVPVAIHADQLTPTWRVYSTGSNVFQTRAGCLIGAEHVNNSYECDIPIGAGICASYQTQTNSPRRARSVASQSIIAYTMSLGAENSVAYSNNSIAIPTNFTISVTTEILPVSMTKTSVDCTMYICGDSTECSNLLLQYGSFCTQLNRALTGIAVEQDKNTQEVFAQVKQIYKTPPIKDFGGFNFSQILPDPSKPSKRSFIEDLLFNKVTLADAGFIKQYGDCLGDIAARDLICAQKFNGLTVLPPLLTDEMIAQYTSALLACTITSGWTCGAGAALQIPFAMQMAYRFNGIGVTQNVLYENQKLIANQFNSAIGKIQDSLSSTPSALGKLQDVVNQNAQALNTLVKQLSSNFGAISSVLNDILSRLDKVEAEVQIDRLITGRLQSLQTYVTQQLIRAAEIRASANLAATKMSECVLGQSKRVDFCGKGYHLMSFPQSAPHGVVFLHVTYVPAQEKNFTTAPAICHDGKAHFPREGVFVSNGTHWFVTQRNFYEPQIITTDNTFVSGNCDVVIGIVNNTVYDPLQPELDSFKEELDKYFKNHTSPDVDLGDISGINASVVNIQKEIDRLNEVAKNLNESLIDLQELGKYEQYIKWPWYIWLGFIAGLIAIVMVTIMLCCMTSCCSCLKGCCSCGSCCKFDEDDSEPVLKGVKLHYT

SEQ ID NO: 239 - protein, 1273 aa, Artificial Sequence
  source: /note="Description of Artificial Sequence: Synthetic polypeptide"
MFVFLVLLPLVSSQCVNLTTRTQLPPAYTNSFTRGVYYPDKVFRSSVLHSTQDLFLPFFSNVTWFHAIHVSGTNGTKRFDNPVLPFNDGVYFASTEKSNIIRGWIFGTTLDSKTQSLLIVNNATNVVIKVCEFQFCNDPFLGVYYHKNNKSWMESEFRVYSSANNCTFEYVSQPFLMDLEGKQGNFKNLREFVFKNIDGYFKIYSKHTPINLVRDLPQGFSALEPLVDLPIGINITRFQTLLALHRSYLTPGDSSSGWTAGAAAYYVGYLQPRTFLLKYNENGTITDAVDCALDPLSETKCTLKSFTVEKGIYQTSNFRVQPTESIVRFPNITNLCPFGEVFNATRFASVYAWNRKRISNCVADYSVLYNSASFSTFKCYGVSPTKLNDLCFTNVYADSFVIRGDEVRQIAPGQTGKIADYNYKLPDDFTGCVIAWNSNNLDSKVGGNYNYLYRLFRKSNLKPFERDISTEIYQAGSTPCNGVEGFNCYFPLQSYGFQPTNGVGYQPYRVVVLSFELLHAPATVCGPKKSTNLVKNKCVNFNFNGLTGTGVLTESNKKFLPFQQFGRDIADTTDAVRDPQTLEILDITPCSFGGVSVITPGTNTSNQVAVLYQDVNCTEVPVAIHADQLTPTWRVYSTGSNVFQTRAGCLIGAEHVNNSYECDIPIGAGICASYQTQTNSPRRARSVASQSIIAYTMSLGAENSVAYSNNSIAIPTNFTISVTTEILPVSMTKTSVDCTMYICGDSTECSNLLLQYGSFCTQLNRALTGIAVEQDKNTQEVFAQVKQIYKTPPIKDFGGFNFSQILPDPSKPSKRSFIEDLLFNKVTLADAGFIKQYGDCLGDIAARDLICAQKFNGLTVLPPLLTDEMIAQYTSALLAGTITCGWTFGAGACLQIPFAMQMAYRFNGIGVTQNVLYENQKLIANQFNSAIGKIQDSLSSTPSALGKLQDVVNQNAQALNTLVKQLSSNFGAISSVLNDILSRLDKVEAEVQIDRLITGRLQSLQTYVTQQLIRAAEIRASANLAATKMSECVLGQSKRVDFCGKGYHLMSFPQSAPHGVVFLHVTYVPAQEKNFTTAPAICHDGKAHFPREGVFVSNGTHWFVTQRNFYEPQIITTDNTFVSGNCDVVIGIVNNTVYDPLQPELDSFKEELDKYFKNHTSPDVDLGDISGINASVVNIQKEIDRLNEVAKNLNESLIDLQELGKYEQYIKWPWYIWLGFIAGLIAIVMVTIMLCCMTSCCSCLKGCCSCGSCCKFDEDDSEPVLKGVKLHYT

SEQ ID NO: 240 - protein, 1273 aa, Artificial Sequence
  source: /note="Description of Artificial Sequence: Synthetic polypeptide"
MFVFLVLLPLVSSQCVNLTTRTQLPPAYTNSFTRGVYYPDKVFRSSVLHSTQDLFLPFFSNVTWFHAIHVSGTNGTKRFDNPVLPFNDGVYFASTEKSNIIRGWIFGTTLDSKTQSLLIVNNATNVVIKVCEFQFCNDPFLGVYYHKNNKSWMESEFRVYSSANNCTFEYVSQPFLMDLEGKQGNFKNLREFVFKNIDGYFKIYSKHTPINLVRDLPQGFSALEPLVDLPIGINITRFQTLLALHRSYLTPGDSSSGWTAGAAAYYVGYLQPRTFLLKYNENGTITDAVDCALDPLSETKCTLKSFTVEKGIYQTSNFRVQPTESIVRFPNITNLCPFGEVFNATRFASVYAWNRKRISNCVADYSVLYNSASFSTFKCYGVSPTKLNDLCFTNVYADSFVIRGDEVRQIAPGQTGKIADYNYKLPDDFTGCVIAWNSNNLDSKVGGNYNYLYRLFRKSNLKPFERDISTEIYQAGSTPCNGVEGFNCYFPLQSYGFQPTNGVGYQPYRVVVLSFELLHAPATVCGPKKSTNLVKNKCVNFNFNGLTGTGVLTESNKKFLPFQQFGRDIADTTDAVRDPQTLEILDITPCSFGGVSVITPGTNTSNQVAVLYQNVNCTEVPVAIHADQLTPTWRVYSTGSNVFQTRAGCLIGAEHVNNSYECDIPIGAGICASYQTQTNSPRRARSVASQSIIAYTMSLGAENSVAYSNNSIAIPTNFTISVTTEILPVSMTKTSVDCTMYICGDSTECSNLLLQYGSFCTQLNRALTGIAVEQDKNTQEVFAQVKQIYKTPPIKDFGGFNFSQILPDPSKPSKRSFIEDLLFNKVTLADAGFIKQYGDCLGDIAARDLICAQKFNGLTVLPPLLTDEMIAQYTSALLAGTITSGWTFGAGPALQIPFAMQMAYRFNGIGVTQNVLYENQKLIANQFNSAIGKIQDSLSSTASALGKLQDVVNQNAQALNTLVKQLSSNFGAISSVLNDILSRLDKVEAEVQIDRLITGRLQSLQTYVTQQLIRAAEIRASANLAATKMSECVLGQSKRVDFCGKGYHLMSFPQSAPHGVVFLHVTYVPAQEKNFTTAPAICHDGKAHFPREGVFVSNGTHWFVTQRNFYEPQIITTDNTFVSGNCDVVIGIVNNTVYDPLQPELDSFKEELDKYFKNHTSPDVDLGDISGINASVVNIQKEIDRLNEVAKNLNESLIDLQELGKYEQYIKWPWYIWLGFIAGLIAIVMVTIMLCCMTSCCSCLKGCCSCGSCCKFDEDDSEPVLKGVKLHYT

SEQ ID NO: 241 - protein, 1273 aa, Artificial Sequence
  source: /note="Description of Artificial Sequence: Synthetic polypeptide"
MFVFLVLLPLVSSQCVNLTTRTQLPPAYTNSFTRGVYYPDKVFRSSVLHSTQDLFLPFFSNVTWFHAIHVSGTNGTKRFDNPVLPFNDGVYFASTEKSNIIRGWIFGTTLDSKTQSLLIVNNATNVVIKVCEFQFCNDPFLGVYYHKNNKSWMESEFRVYSSANNCTFEYVSQPFLMDLEGKQGNFKNLREFVFKNIDGYFKIYSKHTPINLVRDLPQGFSALEPLVDLPIGINITRFQTLLALHRSYLTPGDSSSGWTAGAAAYYVGYLQPRTFLLKYNENGTITDAVDCALDPLSETKCTLKSFTVEKGIYQTSNFRVQPTESIVRFPNITNLCPFGEVFNATRFASVYAWNRKRISNCVADYSVLYNSASFSTFKCYGVSPTKLNDLCFTNVYADSFVIRGDEVRQIAPGQTGKIADYNYKLPDDFTGCVIAWNSNNLDSKVGGNYNYLYRLFRKSNLKPFERDISTEIYQAGSTPCNGVEGFNCYFPLQSYGFQPTNGVGYQPYRVVVLSFELLHAPATVCGPKKSTNLVKNKCVNFNFNGLTGTGVLTESNKKFLPFQQFGRDIADITDAVRDPQTLEILDITPCSFGGVSVITPGTNTSNQVAVLYQDVNCTEVPVAIHADQLTPTWRVYSTGSNVFQTRAGCLIGAEHVNNSYECDIPIGAGICASYQTQTNSPRRARSVASQSIIAYTMSLGAENSVAYSNNSIAIPTNFTISVTTEILPVSMTKTSVDCTMYICGDSTECSNLLLQYGSFCTQLNRALTGIAVEQDKNTQEVFAQVKQIYKTPPIKDFGGFNFSQILPDPSKPSKRSFIEDLLFNKVTLADAGFIKQYGDCLGDIAARDLICAQKFNGLTVLPPLLTDEMIAQYTSALLAGTITSGWTFGAGPALQIPFAMQMAYRFNGIGVTQNVLYENQKLIANQFNSAIGKIQDSLSSTASALGKLQDVVNQNAQALNTLVKQLSSNFGAISSVLNDILSRLDKVEAEVQIDRLITGRLQSLQTYVTQQLIRAAEIRASANLAATKMSECVLGQSKRVDFCGKGYHLMSFPQSAPHGVVFLHVTYVPAQEKNFTTAPAICHDGKAHFPREGVFVSNGTHWFVTQRNFYEPQIITTDNTFVSGNCDVVIGIVNNTVYDPLQPELDSFKEELDKYFKNHTSPDVDLGDISGINASVVNIQKEIDRLNEVAKNLNESLIDLQELGKYEQYIKWPWYIWLGFIAGLIAIVMVTIMLCCMTSCCSCLKGCCSCGSCCKFDEDDSEPVLKGVKLHYT

SEQ ID NO: 242 - protein, 1273 aa, Artificial Sequence
  source: /note="Description of Artificial Sequence: Synthetic polypeptide"
MFVFLVLLPLVSSQCVNLTTRTQLPPAYTNSFTRGVYYPDKVFRSSVLHSTQDLFLPFFSNVTWFHAIHVSGTNGTKRFDNPVLPFNDGVYFASTEKSNIIRGWIFGTTLDSKTQSLLIVNNATNVVIKVCEFQFCNDPFLGVYYHKNNKSWMESEFRVYSSANNCTFEYVSQPFLMDLEGKQGNFKNLREFVFKNIDGYFKIYSKHTPINLVRDLPQGFSALEPLVDLPIGINITRFQTLLALHRSYLTPGDSSSGWTAGAAAYYVGYLQPRTFLLKYNENGTITDAVDCALDPLSETKCTLKSFTVEKGIYQTSNFRVQPTESIVRFPNITNLCPFGEVFNATRFASVYAWNRKRISNCVADYSVLYNSASFSTFKCYGVSPTKLNDLCFTNVYADSFVIRGDEVRQIAPGQTGKIADYNYKLPDDFTGCVIAWNSNNLDSKVGGNYNYLYRLFRKSNLKPFERDISTEIYQAGSTPCNGVEGFNCYFPLQSYGFQPTNGVGYQPYRVVVLSFELLHAPATVCGPKKSTPLVKNKCVNFNFNGLTGTGVLTESNKKFLPFQQFGRDIADTTDAVRDPQTLEILDITPCSFGGVSVITPGTNTSNQVAVLYQDVNCTEVPVAIHADQLTPTWRVYSTGSNVFQTRAGCLIGAEHVNNSYECDIPIGAGICASYQTQTNSPRRARSVASQSIIAYTMSLGAENSVAYSNNSIAIPTNFTISVTTEILPVSMTKTSVDCTMYICGDSTECSNLLLQYGSFCTQLNRALTGIAVEQDKNTQEVFAQVKQIYKTPPIKDFGGFNFSQILPDPSKPSKRSFIEDLLFNKVTLADAGFIKQYGDCLGDIAARDLICAQKFNGLTVLPPLLTDEMIAQYTSALLAGTITSGWTFGAGPALQIPFAMQMAYRFNGIGVTQNVLYENQKLIANQFNSAIGKIQDSLSSTASALGKLQDVVNQNAQALNTLVKQLSSNFGAISSVLNDILSRLDKVEAEVQIDRLITGRLQSLQTYVTQQLIRAAEIRASANLAATKMSECVLGQSKRVDFCGKGYHLMSFPQSAPHGVVFLHVTYVPAQEKNFTTAPAICHDGKAHFPREGVFVSNGTHWFVTQRNFYEPQIITTDNTFVSGNCDVVIGIVNNTVYDPLQPELDSFKEELDKYFKNHTSPDVDLGDISGINASVVNIQKEIDRLNEVAKNLNESLIDLQELGKYEQYIKWPWYIWLGFIAGLIAIVMVTIMLCCMTSCCSCLKGCCSCGSCCKFDEDDSEPVLKGVKLHYT

SEQ ID NO: 243 - protein, 1273 aa, Artificial Sequence
  source: /note="Description of Artificial Sequence: Synthetic polypeptide"
MFVFLVLLPLVSSQCVNLTTRTQLPPAYTNSFTRGVYYPDKVFRSSVLHSTQDLFLPFFSNVTWFHAIHVSGTNGTKRFDNPVLPFNDGVYFASTEKSNIIRGWIFGTTLDSKTQSLLIVNNATNVVIKVCEFQFCNDPFLGVYYHKNNKSWMESEFRVYSSANNCTFEYVSQPFLMDLEGKQGNFKNLREFVFKNIDGYFKIYSKHTPINLVRDLPQGFSALEPLVDLPIGINITRFQTLLALHRSYLTPGDSSSGWTAGAAAYYVGYLQPRTFLLKYNENGTITDAVDCALDPLSETKCTLKSFTVEKGIYQTSNFRVQPTESIVRFPNITNLCPFGEVFNATRFASVYAWNRKRISNCVADYSVLYNSASFSTFKCYGVSPTKLNDLCFTNVYADSFVIRGDEVRQIAPGQTGKIADYNYKLPDDFTGCVIAWNSNNLDSKVGGNYNYLYRLFRKSNLKPFERDISTEIYQAGSTPCNGVEGFNCYFPLQSYGFQPTNGVGYQPYRVVVLSFELLHAPATVCGPKKSTNLVKNKCVNFNFNGLTGTGVLTESNKKFLPFQQFGRDIADTTDAVRDPQTLEILDITPCSFGGVSVITPGTNTSNQVAVLYQDVNCTEVPVAIHADQLTPTWRVYSTGSNVFQTRAGCLIGAEHVNNSYECDIPIGAGICASYQTQTNSPRRARSVASQSIIAYTMSLGAENSVAYSNNSIAIPTNFTISVTTEILPVSMTKTSVDCTMYICGDSTECSNLLLQYGSFCTQLNRALTGIAVEQDKNTQEVFAQVKQIYKTPPIKDFGGFNFSQILPDPSKPSKRSFIEDLLFNKVTLADAGFIKQYGDCLGDIAARDLICAQKFNGLTVLPPLLTDEMIAQYTSALLACTITSGWTCGAGPALQIPFAMQMAYRFNGIGVTQNVLYENQKLIANQFNSAIGKIQDSLSSTASALGKLQDVVNQNAQALNTLVKQLSSNFGAISSVLNDILSRLDKVEAEVQIDRLITGRLQSLQTYVTQQLIRAAEIRASANLAATKMSECVLGQSKRVDFCGKGYHLMSFPQSAPHGVVFLHVTYVPAQEKNFTTAPAICHDGKAHFPREGVFVSNGTHWFVTQRNFYEPQIITTDNTFVSGNCDVVIGIVNNTVYDPLQPELDSFKEELDKYFKNHTSPDVDLGDISGINASVVNIQKEIDRLNEVAKNLNESLIDLQELGKYEQYIKWPWYIWLGFIAGLIAIVMVTIMLCCMTSCCSCLKGCCSCGSCCKFDEDDSEPVLKGVKLHYT

SEQ ID NO: 244 - protein, 1273 aa, Artificial Sequence
  source: /note="Description of Artificial Sequence: Synthetic polypeptide"
MFVFLVLLPLVSSQCVNLTTRTQLPPAYTNSFTRGVYYPDKVFRSSVLHSTQDLFLPFFSNVTWFHAIHVSGTNGTKRFDNPVLPFNDGVYFASTEKSNIIRGWIFGTTLDSKTQSLLIVNNATNVVIKVCEFQFCNDPFLGVYYHKNNKSWMESEFRVYSSANNCTFEYVSQPFLMDLEGKQGNFKNLREFVFKNIDGYFKIYSKHTPINLVRDLPQGFSALEPLVDLPIGINITRFQTLLALHRSYLTPGDSSSGWTAGAAAYYVGYLQPRTFLLKYNENGTITDAVDCALDPLSETKCTLKSFTVEKGIYQTSNFRVQPTESIVRFPNITNLCPFGEVFNATRFASVYAWNRKRISNCVADYSVLYNSASFSTFKCYGVSPTKLNDLCFTNVYADSFVIRGDEVRQIAPGQTGKIADYNYKLPDDFTGCVIAWNSNNLDSKVGGNYNYLYRLFRKSNLKPFERDISTEIYQAGSTPCNGVEGFNCYFPLQSYGFQPTNGVGYQPYRVVVLSFELLHAPATVCGPKKSTNLVKNKCVNFNFNGLTGTGVLTESNKKFLPFQQFGRDIADTTDAVRDPQTLEILDITPCSFGGVSVITPGTNTSNQVAVLYQDVNCTEVPVAIHADQLTPTWRVYSTGSNVFQTRAGCLIGAEHVNNSYECDIPIGAGICASYQTQTNSPRRARSVASQSIIAYTMSLGAENSVAYSNNSIAIPTNFTISVTTEILPVSMTKTSVDCTMYICGDSTECSNLLLQYGSFCTQLNRALTGIAVEQDKNTQEVFAQVKQIYKTPPIKDFGGFNFSQILPDPSKPSKRSFIEDLLFNKVTLADAGFIKQYGDCLGDIAARDLICAQKFNGLTVLPPLLTDEMIAQYTSALLAGTITCGWTFGAGPCLQIPFAMQMAYRFNGIGVTQNVLYENQKLIANQFNSAIGKIQDSLSSTASALGKLQDVVNQNAQALNTLVKQLSSNFGAISSVLNDILSRLDKVEAEVQIDRLITGRLQSLQTYVTQQLIRAAEIRASANLAATKMSECVLGQSKRVDFCGKGYHLMSFPQSAPHGVVFLHVTYVPAQEKNFTTAPAICHDGKAHFPREGVFVSNGTHWFVTQRNFYEPQIITTDNTFVSGNCDVVIGIVNNTVYDPLQPELDSFKEELDKYFKNHTSPDVDLGDISGINASVVNIQKEIDRLNEVAKNLNESLIDLQELGKYEQYIKWPWYIWLGFIAGLIAIVMVTIMLCCMTSCCSCLKGCCSCGSCCKFDEDDSEPVLKGVKLHYT

SEQ ID NO: 245 - protein, 1273 aa, Artificial Sequence
  source: /note="Description of Artificial Sequence: Synthetic polypeptide"
MFVFLVLLPLVSSQCVNLTTRTQLPPAYTNSFTRGVYYPDKVFRSSVLHSTQDLFLPFFSNVTWFHAIHVSGTNGTKRFDNPVLPFNDGVYFASTEKSNIIRGWIFGTTLDSKTQSLLIVNNATNVVIKVCEFQFCNDPFLGVYYHKNNKSWMESEFRVYSSANNCTFEYVSQPFLMDLEGKQGNFKNLREFVFKNIDGYFKIYSKHTPINLVRDLPQGFSALEPLVDLPIGINITRFQTLLALHRSYLTPGDSSSGWTAGAAAYYVGYLQPRTFLLKYNENGTITDAVDCALDPLSETKCTLKSFTVEKGIYQTSNFRVQPTESIVRFPNITNLCPFGEVFNATRFASVYAWNRKRISNCVADYSVLYNSASFSTFKCYGVSPTKLNDLCFTNVYADSFVIRGDEVRQIAPGQTGKIADYNYKLPDDFTGCVIAWNSNNLDSKVGGNYNYLYRLFRKSNLKPFERDISTEIYQAGSTPCNGVEGFNCYFPLQSYGFQPTNGVGYQPYRVVVLSFELLHAPATVCGPKKSTNLVKNKCVNFNFNGLTGTGVLTESNKKFLPFQQFGRDIADITDAVRDPQTLEILDITPCSFGGVSVITPGTNTSNQVAVLYQNVNCTEVPVAIHADQLTPTWRVYSTGSNVFQTRAGCLIGAEHVNNSYECDIPIGAGICASYQTQTNSPRRARSVASQSIIAYTMSLGAENSVAYSNNSIAIPTNFTISVTTEILPVSMTKTSVDCTMYICGDSTECSNLLLQYGSFCTQLNRALTGIAVEQDKNTQEVFAQVKQIYKTPPIKDFGGFNFSQILPDPSKPSKRSFIEDLLFNKVTLADAGFIKQYGDCLGDIAARDLICAQKFNGLTVLPPLLTDEMIAQYTSALLAGTITSGWTFGAGAALQIPFAMQMAYRFNGIGVTQNVLYENQKLIANQFNSAIGKIQDSLSSTASALGKLQDVVNQNAQALNTLVKQLSSNFGAISSVLNDILSRLDKVEAEVQIDRLITGRLQSLQTYVTQQLIRAAEIRASANLAATKMSECVLGQSKRVDFCGKGYHLMSFPQSAPHGVVFLHVTYVPAQEKNFTTAPAICHDGKAHFPREGVFVSNGTHWFVTQRNFYEPQIITTDNTFVSGNCDVVIGIVNNTVYDPLQPELDSFKEELDKYFKNHTSPDVDLGDISGINASVVNIQKEIDRLNEVAKNLNESLIDLQELGKYEQYIKWPWYIWLGFIAGLIAIVMVTIMLCCMTSCCSCLKGCCSCGSCCKFDEDDSEPVLKGVKLHYT

SEQ ID NO: 246 - protein, 1273 aa, Artificial Sequence
  source: /note="Description of Artificial Sequence: Synthetic polypeptide"
MFVFLVLLPLVSSQCVNLTTRTQLPPAYTNSFTRGVYYPDKVFRSSVLHSTQDLFLPFFSNVTWFHAIHVSGTNGTKRFDNPVLPFNDGVYFASTEKSNIIRGWIFGTTLDSKTQSLLIVNNATNVVIKVCEFQFCNDPFLGVYYHKNNKSWMESEFRVYSSANNCTFEYVSQPFLMDLEGKQGNFKNLREFVFKNIDGYFKIYSKHTPINLVRDLPQGFSALEPLVDLPIGINITRFQTLLALHRSYLTPGDSSSGWTAGAAAYYVGYLQPRTFLLKYNENGTITDAVDCALDPLSETKCTLKSFTVEKGIYQTSNFRVQPTESIVRFPNITNLCPFGEVFNATRFASVYAWNRKRISNCVADYSVLYNSASFSTFKCYGVSPTKLNDLCFTNVYADSFVIRGDEVRQIAPGQTGKIADYNYKLPDDFTGCVIAWNSNNLDSKVGGNYNYLYRLFRKSNLKPFERDISTEIYQAGSTPCNGVEGFNCYFPLQSYGFQPTNGVGYQPYRVVVLSFELLHAPATVCGPKKSTPLVKNKCVNFNFNGLTGTGVLTESNKKFLPFQQFGRDIADTTDAVRDPQTLEILDITPCSFGGVSVITPGTNTSNQVAVLYQNVNCTEVPVAIHADQLTPTWRVYSTGSNVFQTRAGCLIGAEHVNNSYECDIPIGAGICASYQTQTNSPRRARSVASQSIIAYTMSLGAENSVAYSNNSIAIPTNFTISVTTEILPVSMTKTSVDCTMYICGDSTECSNLLLQYGSFCTQLNRALTGIAVEQDKNTQEVFAQVKQIYKTPPIKDFGGFNFSQILPDPSKPSKRSFIEDLLFNKVTLADAGFIKQYGDCLGDIAARDLICAQKFNGLTVLPPLLTDEMIAQYTSALLAGTITSGWTFGAGAALQIPFAMQMAYRFNGIGVTQNVLYENQKLIANQFNSAIGKIQDSLSSTASALGKLQDVVNQNAQALNTLVKQLSSNFGAISSVLNDILSRLDKVEAEVQIDRLITGRLQSLQTYVTQQLIRAAEIRASANLAATKMSECVLGQSKRVDFCGKGYHLMSFPQSAPHGVVFLHVTYVPAQEKNFTTAPAICHDGKAHFPREGVFVSNGTHWFVTQRNFYEPQIITTDNTFVSGNCDVVIGIVNNTVYDPLQPELDSFKEELDKYFKNHTSPDVDLGDISGINASVVNIQKEIDRLNEVAKNLNESLIDLQELGKYEQYIKWPWYIWLGFIAGLIAIVMVTIMLCCMTSCCSCLKGCCSCGSCCKFDEDDSEPVLKGVKLHYT

SEQ ID NO: 247 - protein, 1273 aa, Artificial Sequence
  source: /note="Description of Artificial Sequence: Synthetic polypeptide"
MFVFLVLLPLVSSQCVNLTTRTQLPPAYTNSFTRGVYYPDKVFRSSVLHSTQDLFLPFFSNVTWFHAIHVSGTNGTKRFDNPVLPFNDGVYFASTEKSNIIRGWIFGTTLDSKTQSLLIVNNATNVVIKVCEFQFCNDPFLGVYYHKNNKSWMESEFRVYSSANNCTFEYVSQPFLMDLEGKQGNFKNLREFVFKNIDGYFKIYSKHTPINLVRDLPQGFSALEPLVDLPIGINITRFQTLLALHRSYLTPGDSSSGWTAGAAAYYVGYLQPRTFLLKYNENGTITDAVDCALDPLSETKCTLKSFTVEKGIYQTSNFRVQPTESIVRFPNITNLCPFGEVFNATRFASVYAWNRKRISNCVADYSVLYNSASFSTFKCYGVSPTKLNDLCFTNVYADSFVIRGDEVRQIAPGQTGKIADYNYKLPDDFTGCVIAWNSNNLDSKVGGNYNYLYRLFRKSNLKPFERDISTEIYQAGSTPCNGVEGFNCYFPLQSYGFQPTNGVGYQPYRVVVLSFELLHAPATVCGPKKSTNLVKNKCVNFNFNGLTGTGVLTESNKKFLPFQQFGRDIADTTDAVRDPQTLEILDITPCSFGGVSVITPGTNTSNQVAVLYQNVNCTEVPVAIHADQLTPTWRVYSTGSNVFQTRAGCLIGAEHVNNSYECDIPIGAGICASYQTQTNSPRRARSVASQSIIAYTMSLGAENSVAYSNNSIAIPTNFTISVTTEILPVSMTKTSVDCTMYICGDSTECSNLLLQYGSFCTQLNRALTGIAVEQDKNTQEVFAQVKQIYKTPPIKDFGGFNFSQILPDPSKPSKRSFIEDLLFNKVTLADAGFIKQYGDCLGDIAARDLICAQKFNGLTVLPPLLTDEMIAQYTSALLACTITSGWTCGAGAALQIPFAMQMAYRFNGIGVTQNVLYENQKLIANQFNSAIGKIQDSLSSTASALGKLQDVVNQNAQALNTLVKQLSSNFGAISSVLNDILSRLDKVEAEVQIDRLITGRLQSLQTYVTQQLIRAAEIRASANLAATKMSECVLGQSKRVDFCGKGYHLMSFPQSAPHGVVFLHVTYVPAQEKNFTTAPAICHDGKAHFPREGVFVSNGTHWFVTQRNFYEPQIITTDNTFVSGNCDVVIGIVNNTVYDPLQPELDSFKEELDKYFKNHTSPDVDLGDISGINASVVNIQKEIDRLNEVAKNLNESLIDLQELGKYEQYIKWPWYIWLGFIAGLIAIVMVTIMLCCMTSCCSCLKGCCSCGSCCKFDEDDSEPVLKGVKLHYT

SEQ ID NO: 248 - protein, 1273 aa, Artificial Sequence
  source: /note="Description of Artificial Sequence: Synthetic polypeptide"
MFVFLVLLPLVSSQCVNLTTRTQLPPAYTNSFTRGVYYPDKVFRSSVLHSTQDLFLPFFSNVTWFHAIHVSGTNGTKRFDNPVLPFNDGVYFASTEKSNIIRGWIFGTTLDSKTQSLLIVNNATNVVIKVCEFQFCNDPFLGVYYHKNNKSWMESEFRVYSSANNCTFEYVSQPFLMDLEGKQGNFKNLREFVFKNIDGYFKIYSKHTPINLVRDLPQGFSALEPLVDLPIGINITRFQTLLALHRSYLTPGDSSSGWTAGAAAYYVGYLQPRTFLLKYNENGTITDAVDCALDPLSETKCTLKSFTVEKGIYQTSNFRVQPTESIVRFPNITNLCPFGEVFNATRFASVYAWNRKRISNCVADYSVLYNSASFSTFKCYGVSPTKLNDLCFTNVYADSFVIRGDEVRQIAPGQTGKIADYNYKLPDDFTGCVIAWNSNNLDSKVGGNYNYLYRLFRKSNLKPFERDISTEIYQAGSTPCNGVEGFNCYFPLQSYGFQPTNGVGYQPYRVVVLSFELLHAPATVCGPKKSTNLVKNKCVNFNFNGLTGTGVLTESNKKFLPFQQFGRDIADTTDAVRDPQTLEILDITPCSFGGVSVITPGTNTSNQVAVLYQNVNCTEVPVAIHADQLTPTWRVYSTGSNVFQTRAGCLIGAEHVNNSYECDIPIGAGICASYQTQTNSPRRARSVASQSIIAYTMSLGAENSVAYSNNSIAIPTNFTISVTTEILPVSMTKTSVDCTMYICGDSTECSNLLLQYGSFCTQLNRALTGIAVEQDKNTQEVFAQVKQIYKTPPIKDFGGFNFSQILPDPSKPSKRSFIEDLLFNKVTLADAGFIKQYGDCLGDIAARDLICAQKFNGLTVLPPLLTDEMIAQYTSALLAGTITCGWTFGAGACLQIPFAMQMAYRFNGIGVTQNVLYENQKLIANQFNSAIGKIQDSLSSTASALGKLQDVVNQNAQALNTLVKQLSSNFGAISSVLNDILSRLDKVEAEVQIDRLITGRLQSLQTYVTQQLIRAAEIRASANLAATKMSECVLGQSKRVDFCGKGYHLMSFPQSAPHGVVFLHVTYVPAQEKNFTTAPAICHDGKAHFPREGVFVSNGTHWFVTQRNFYEPQIITTDNTFVSGNCDVVIGIVNNTVYDPLQPELDSFKEELDKYFKNHTSPDVDLGDISGINASVVNIQKEIDRLNEVAKNLNESLIDLQELGKYEQYIKWPWYIWLGFIAGLIAIVMVTIMLCCMTSCCSCLKGCCSCGSCCKFDEDDSEPVLKGVKLHYT

SEQ ID NO: 249 - protein, 1273 aa, Artificial Sequence
  source: /note="Description of Artificial Sequence: Synthetic polypeptide"
MFVFLVLLPLVSSQCVNLTTRTQLPPAYTNSFTRGVYYPDKVFRSSVLHSTQDLFLPFFSNVTWFHAIHVSGTNGTKRFDNPVLPFNDGVYFASTEKSNIIRGWIFGTTLDSKTQSLLIVNNATNVVIKVCEFQFCNDPFLGVYYHKNNKSWMESEFRVYSSANNCTFEYVSQPFLMDLEGKQGNFKNLREFVFKNIDGYFKIYSKHTPINLVRDLPQGFSALEPLVDLPIGINITRFQTLLALHRSYLTPGDSSSGWTAGAAAYYVGYLQPRTFLLKYNENGTITDAVDCALDPLSETKCTLKSFTVEKGIYQTSNFRVQPTESIVRFPNITNLCPFGEVFNATRFASVYAWNRKRISNCVADYSVLYNSASFSTFKCYGVSPTKLNDLCFTNVYADSFVIRGDEVRQIAPGQTGKIADYNYKLPDDFTGCVIAWNSNNLDSKVGGNYNYLYRLFRKSNLKPFERDISTEIYQAGSTPCNGVEGFNCYFPLQSYGFQPTNGVGYQPYRVVVLSFELLHAPATVCGPKKSTPLVKNKCVNFNFNGLTGTGVLTESNKKFLPFQQFGRDIADITDAVRDPQTLEILDITPCSFGGVSVITPGTNTSNQVAVLYQDVNCTEVPVAIHADQLTPTWRVYSTGSNVFQTRAGCLIGAEHVNNSYECDIPIGAGICASYQTQTNSPRRARSVASQSIIAYTMSLGAENSVAYSNNSIAIPTNFTISVTTEILPVSMTKTSVDCTMYICGDSTECSNLLLQYGSFCTQLNRALTGIAVEQDKNTQEVFAQVKQIYKTPPIKDFGGFNFSQILPDPSKPSKRSFIEDLLFNKVTLADAGFIKQYGDCLGDIAARDLICAQKFNGLTVLPPLLTDEMIAQYTSALLAGTITSGWTFGAGAALQIPFAMQMAYRFNGIGVTQNVLYENQKLIANQFNSAIGKIQDSLSSTASALGKLQDVVNQNAQALNTLVKQLSSNFGAISSVLNDILSRLDKVEAEVQIDRLITGRLQSLQTYVTQQLIRAAEIRASANLAATKMSECVLGQSKRVDFCGKGYHLMSFPQSAPHGVVFLHVTYVPAQEKNFTTAPAICHDGKAHFPREGVFVSNGTHWFVTQRNFYEPQIITTDNTFVSGNCDVVIGIVNNTVYDPLQPELDSFKEELDKYFKNHTSPDVDLGDISGINASVVNIQKEIDRLNEVAKNLNESLIDLQELGKYEQYIKWPWYIWLGFIAGLIAIVMVTIMLCCMTSCCSCLKGCCSCGSCCKFDEDDSEPVLKGVKLHYT

SEQ ID NO: 250 - protein, 1273 aa, Artificial Sequence
  source: /note="Description of Artificial Sequence: Synthetic polypeptide"
MFVFLVLLPLVSSQCVNLTTRTQLPPAYTNSFTRGVYYPDKVFRSSVLHSTQDLFLPFFSNVTWFHAIHVSGTNGTKRFDNPVLPFNDGVYFASTEKSNIIRGWIFGTTLDSKTQSLLIVNNATNVVIKVCEFQFCNDPFLGVYYHKNNKSWMESEFRVYSSANNCTFEYVSQPFLMDLEGKQGNFKNLREFVFKNIDGYFKIYSKHTPINLVRDLPQGFSALEPLVDLPIGINITRFQTLLALHRSYLTPGDSSSGWTAGAAAYYVGYLQPRTFLLKYNENGTITDAVDCALDPLSETKCTLKSFTVEKGIYQTSNFRVQPTESIVRFPNITNLCPFGEVFNATRFASVYAWNRKRISNCVADYSVLYNSASFSTFKCYGVSPTKLNDLCFTNVYADSFVIRGDEVRQIAPGQTGKIADYNYKLPDDFTGCVIAWNSNNLDSKVGGNYNYLYRLFRKSNLKPFERDISTEIYQAGSTPCNGVEGFNCYFPLQSYGFQPTNGVGYQPYRVVVLSFELLHAPATVCGPKKSTNLVKNKCVNFNFNGLTGTGVLTESNKKFLPFQQFGRDIADITDAVRDPQTLEILDITPCSFGGVSVITPGTNTSNQVAVLYQDVNCTEVPVAIHADQLTPTWRVYSTGSNVFQTRAGCLIGAEHVNNSYECDIPIGAGICASYQTQTNSPRRARSVASQSIIAYTMSLGAENSVAYSNNSIAIPTNFTISVTTEILPVSMTKTSVDCTMYICGDSTECSNLLLQYGSFCTQLNRALTGIAVEQDKNTQEVFAQVKQIYKTPPIKDFGGFNFSQILPDPSKPSKRSFIEDLLFNKVTLADAGFIKQYGDCLGDIAARDLICAQKFNGLTVLPPLLTDEMIAQYTSALLACTITSGWTCGAGAALQIPFAMQMAYRFNGIGVTQNVLYENQKLIANQFNSAIGKIQDSLSSTASALGKLQDVVNQNAQALNTLVKQLSSNFGAISSVLNDILSRLDKVEAEVQIDRLITGRLQSLQTYVTQQLIRAAEIRASANLAATKMSECVLGQSKRVDFCGKGYHLMSFPQSAPHGVVFLHVTYVPAQEKNFTTAPAICHDGKAHFPREGVFVSNGTHWFVTQRNFYEPQIITTDNTFVSGNCDVVIGIVNNTVYDPLQPELDSFKEELDKYFKNHTSPDVDLGDISGINASVVNIQKEIDRLNEVAKNLNESLIDLQELGKYEQYIKWPWYIWLGFIAGLIAIVMVTIMLCCMTSCCSCLKGCCSCGSCCKFDEDDSEPVLKGVKLHYT

SEQ ID NO: 251 - protein, 1273 aa, Artificial Sequence
  source: /note="Description of Artificial Sequence: Synthetic polypeptide"
MFVFLVLLPLVSSQCVNLTTRTQLPPAYTNSFTRGVYYPDKVFRSSVLHSTQDLFLPFFSNVTWFHAIHVSGTNGTKRFDNPVLPFNDGVYFASTEKSNIIRGWIFGTTLDSKTQSLLIVNNATNVVIKVCEFQFCNDPFLGVYYHKNNKSWMESEFRVYSSANNCTFEYVSQPFLMDLEGKQGNFKNLREFVFKNIDGYFKIYSKHTPINLVRDLPQGFSALEPLVDLPIGINITRFQTLLALHRSYLTPGDSSSGWTAGAAAYYVGYLQPRTFLLKYNENGTITDAVDCALDPLSETKCTLKSFTVEKGIYQTSNFRVQPTESIVRFPNITNLCPFGEVFNATRFASVYAWNRKRISNCVADYSVLYNSASFSTFKCYGVSPTKLNDLCFTNVYADSFVIRGDEVRQIAPGQTGKIADYNYKLPDDFTGCVIAWNSNNLDSKVGGNYNYLYRLFRKSNLKPFERDISTEIYQAGSTPCNGVEGFNCYFPLQSYGFQPTNGVGYQPYRVVVLSFELLHAPATVCGPKKSTNLVKNKCVNFNFNGLTGTGVLTESNKKFLPFQQFGRDIADITDAVRDPQTLEILDITPCSFGGVSVITPGTNTSNQVAVLYQDVNCTEVPVAIHADQLTPTWRVYSTGSNVFQTRAGCLIGAEHVNNSYECDIPIGAGICASYQTQTNSPRRARSVASQSIIAYTMSLGAENSVAYSNNSIAIPTNFTISVTTEILPVSMTKTSVDCTMYICGDSTECSNLLLQYGSFCTQLNRALTGIAVEQDKNTQEVFAQVKQIYKTPPIKDFGGFNFSQILPDPSKPSKRSFIEDLLFNKVTLADAGFIKQYGDCLGDIAARDLICAQKFNGLTVLPPLLTDEMIAQYTSALLAGTITCGWTFGAGACLQIPFAMQMAYRFNGIGVTQNVLYENQKLIANQFNSAIGKIQDSLSSTASALGKLQDVVNQNAQALNTLVKQLSSNFGAISSVLNDILSRLDKVEAEVQIDRLITGRLQSLQTYVTQQLIRAAEIRASANLAATKMSECVLGQSKRVDFCGKGYHLMSFPQSAPHGVVFLHVTYVPAQEKNFTTAPAICHDGKAHFPREGVFVSNGTHWFVTQRNFYEPQIITTDNTFVSGNCDVVIGIVNNTVYDPLQPELDSFKEELDKYFKNHTSPDVDLGDISGINASVVNIQKEIDRLNEVAKNLNESLIDLQELGKYEQYIKWPWYIWLGFIAGLIAIVMVTIMLCCMTSCCSCLKGCCSCGSCCKFDEDDSEPVLKGVKLHYT

SEQ ID NO: 252 - protein, 1273 aa, Artificial Sequence
  source: /note="Description of Artificial Sequence: Synthetic polypeptide"
MFVFLVLLPLVSSQCVNLTTRTQLPPAYTNSFTRGVYYPDKVFRSSVLHSTQDLFLPFFSNVTWFHAIHVSGTNGTKRFDNPVLPFNDGVYFASTEKSNIIRGWIFGTTLDSKTQSLLIVNNATNVVIKVCEFQFCNDPFLGVYYHKNNKSWMESEFRVYSSANNCTFEYVSQPFLMDLEGKQGNFKNLREFVFKNIDGYFKIYSKHTPINLVRDLPQGFSALEPLVDLPIGINITRFQTLLALHRSYLTPGDSSSGWTAGAAAYYVGYLQPRTFLLKYNENGTITDAVDCALDPLSETKCTLKSFTVEKGIYQTSNFRVQPTESIVRFPNITNLCPFGEVFNATRFASVYAWNRKRISNCVADYSVLYNSASFSTFKCYGVSPTKLNDLCFTNVYADSFVIRGDEVRQIAPGQTGKIADYNYKLPDDFTGCVIAWNSNNLDSKVGGNYNYLYRLFRKSNLKPFERDISTEIYQAGSTPCNGVEGFNCYFPLQSYGFQPTNGVGYQPYRVVVLSFELLHAPATVCGPKKSTPLVKNKCVNFNFNGLTGTGVLTESNKKFLPFQQFGRDIADTTDAVRDPQTLEILDITPCSFGGVSVITPGTNTSNQVAVLYQDVNCTEVPVAIHADQLTPTWRVYSTGSNVFQTRAGCLIGAEHVNNSYECDIPIGAGICASYQTQTNSPRRARSVASQSIIAYTMSLGAENSVAYSNNSIAIPTNFTISVTTEILPVSMTKTSVDCTMYICGDSTECSNLLLQYGSFCTQLNRALTGIAVEQDKNTQEVFAQVKQIYKTPPIKDFGGFNFSQILPDPSKPSKRSFIEDLLFNKVTLADAGFIKQYGDCLGDIAARDLICAQKFNGLTVLPPLLTDEMIAQYTSALLACTITSGWTCGAGAALQIPFAMQMAYRFNGIGVTQNVLYENQKLIANQFNSAIGKIQDSLSSTASALGKLQDVVNQNAQALNTLVKQLSSNFGAISSVLNDILSRLDKVEAEVQIDRLITGRLQSLQTYVTQQLIRAAEIRASANLAATKMSECVLGQSKRVDFCGKGYHLMSFPQSAPHGVVFLHVTYVPAQEKNFTTAPAICHDGKAHFPREGVFVSNGTHWFVTQRNFYEPQIITTDNTFVSGNCDVVIGIVNNTVYDPLQPELDSFKEELDKYFKNHTSPDVDLGDISGINASVVNIQKEIDRLNEVAKNLNESLIDLQELGKYEQYIKWPWYIWLGFIAGLIAIVMVTIMLCCMTSCCSCLKGCCSCGSCCKFDEDDSEPVLKGVKLHYT

SEQ ID NO: 253 - protein, 1273 aa, Artificial Sequence
  source: /note="Description of Artificial Sequence: Synthetic polypeptide"
MFVFLVLLPLVSSQCVNLTTRTQLPPAYTNSFTRGVYYPDKVFRSSVLHSTQDLFLPFFSNVTWFHAIHVSGTNGTKRFDNPVLPFNDGVYFASTEKSNIIRGWIFGTTLDSKTQSLLIVNNATNVVIKVCEFQFCNDPFLGVYYHKNNKSWMESEFRVYSSANNCTFEYVSQPFLMDLEGKQGNFKNLREFVFKNIDGYFKIYSKHTPINLVRDLPQGFSALEPLVDLPIGINITRFQTLLALHRSYLTPGDSSSGWTAGAAAYYVGYLQPRTFLLKYNENGTITDAVDCALDPLSETKCTLKSFTVEKGIYQTSNFRVQPTESIVRFPNITNLCPFGEVFNATRFASVYAWNRKRISNCVADYSVLYNSASFSTFKCYGVSPTKLNDLCFTNVYADSFVIRGDEVRQIAPGQTGKIADYNYKLPDDFTGCVIAWNSNNLDSKVGGNYNYLYRLFRKSNLKPFERDISTEIYQAGSTPCNGVEGFNCYFPLQSYGFQPTNGVGYQPYRVVVLSFELLHAPATVCGPKKSTPLVKNKCVNFNFNGLTGTGVLTESNKKFLPFQQFGRDIADTTDAVRDPQTLEILDITPCSFGGVSVITPGTNTSNQVAVLYQDVNCTEVPVAIHADQLTPTWRVYSTGSNVFQTRAGCLIGAEHVNNSYECDIPIGAGICASYQTQTNSPRRARSVASQSIIAYTMSLGAENSVAYSNNSIAIPTNFTISVTTEILPVSMTKTSVDCTMYICGDSTECSNLLLQYGSFCTQLNRALTGIAVEQDKNTQEVFAQVKQIYKTPPIKDFGGFNFSQILPDPSKPSKRSFIEDLLFNKVTLADAGFIKQYGDCLGDIAARDLICAQKFNGLTVLPPLLTDEMIAQYTSALLAGTITCGWTFGAGACLQIPFAMQMAYRFNGIGVTQNVLYENQKLIANQFNSAIGKIQDSLSSTASALGKLQDVVNQNAQALNTLVKQLSSNFGAISSVLNDILSRLDKVEAEVQIDRLITGRLQSLQTYVTQQLIRAAEIRASANLAATKMSECVLGQSKRVDFCGKGYHLMSFPQSAPHGVVFLHVTYVPAQEKNFTTAPAICHDGKAHFPREGVFVSNGTHWFVTQRNFYEPQIITTDNTFVSGNCDVVIGIVNNTVYDPLQPELDSFKEELDKYFKNHTSPDVDLGDISGINASVVNIQKEIDRLNEVAKNLNESLIDLQELGKYEQYIKWPWYIWLGFIAGLIAIVMVTIMLCCMTSCCSCLKGCCSCGSCCKFDEDDSEPVLKGVKLHYT

SEQ ID NO: 254 - protein, 1273 aa, Artificial Sequence; identical to SEQ ID NO: 212
  source: /note="Description of Artificial Sequence: Synthetic polypeptide"

SEQ ID NO: 255 - protein, 1273 aa, Artificial Sequence
  source: /note="Description of Artificial Sequence: Synthetic polypeptide"
MFVFLVLLPLVSSQCVNLTTRTQLPPAYTNSFTRGVYYPDKVFRSSVLHSTQDLFLPFFSNVTWFHAIHVSGTNGTKRFDNPVLPFNDGVYFASTEKSNIIRGWIFGTTLDSKTQSLLIVNNATNVVIKVCEFQFCNDPFLGVYYHKNNKSWMESEFRVYSSANNCTFEYVSQPFLMDLEGKQGNFKNLREFVFKNIDGYFKIYSKHTPINLVRDLPQGFSALEPLVDLPIGINITRFQTLLALHRSYLTPGDSSSGWTAGAAAYYVGYLQPRTFLLKYNENGTITDAVDCALDPLSETKCTLKSFTVEKGIYQTSNFRVQPTESIVRFPNITNLCPFGEVFNATRFASVYAWNRKRISNCVADYSVLYNSASFSTFKCYGVSPTKLNDLCFTNVYADSFVIRGDEVRQIAPGQTGKIADYNYKLPDDFTGCVIAWNSNNLDSKVGGNYNYLYRLFRKSNLKPFERDISTEIYQAGSTPCNGVEGFNCYFPLQSYGFQPTNGVGYQPYRVVVLSFELLHAPATVCGPKKSTNLVKNKCVNFNFNGLTGTGVLTESNKKFLPFQQFGRDIADITDAVRDPQTLEILDITPCSFGGVSVITPGTNTSNQVAVLYQDVNCTEVPVAIHADQLTPTWRVYSTGSNVFQTRAGCLIGAEHVNNSYECDIPIGAGICASYQTQTNSPRRARSVASQSIIAYTMSLGAENSVAYSNNSIAIPTNFTISVTTEILPVSMTKTSVDCTMYICGDSTECSNLLLQYGSFCTQLNRALTGIAVEQDKNTQEVFAQVKQIYKTPPIKDFGGFNFSQILPDPSKPSKRSFIEDLLFNKVTLADAGFIKQYGDCLGDIAARDLICAQKFNGLTVLPPLLTDEMIAQYTSALLAGTITSGWTFGAGPALQIPFAMQMAYRFNGIGVTQNVLYENQKLIANQFNSAIGKIQDSLSSTPSALGKLQDVVNQNAQALNTLVKQLSSNFGAISSVLNDILSRLDKVEAEVQIDRLITGRLQSLQTYVTQQLIRAAEIRASANLAATKMSECVLGQSKRVDFCGKGYHLMSFPQSAPHGVVFLHVTYVPAQEKNFTTAPAICHDGKAHFPREGVFVSNGTHWFVTQRNFYEPQIITTDNTFVSGNCDVVIGIVNNTVYDPLQPELDSFKEELDKYFKNHTSPDVDLGDISGINASVVNIQKEIDRLNEVAKNLNESLIDLQELGKYEQYIKWPWYIWLGFIAGLIAIVMVTIMLCCMTSCCSCLKGCCSCGSCCKFDEDDSEPVLKGVKLHYT

SEQ ID NO: 256 - protein, 1273 aa, Artificial Sequence
  source: /note="Description of Artificial Sequence: Synthetic polypeptide"
MFVFLVLLPLVSSQCVNLTTRTQLPPAYTNSFTRGVYYPDKVFRSSVLHSTQDLFLPFFSNVTWFHAIHVSGTNGTKRFDNPVLPFNDGVYFASTEKSNIIRGWIFGTTLDSKTQSLLIVNNATNVVIKVCEFQFCNDPFLGVYYHKNNKSWMESEFRVYSSANNCTFEYVSQPFLMDLEGKQGNFKNLREFVFKNIDGYFKIYSKHTPINLVRDLPQGFSALEPLVDLPIGINITRFQTLLALHRSYLTPGDSSSGWTAGAAAYYVGYLQPRTFLLKYNENGTITDAVDCALDPLSETKCTLKSFTVEKGIYQTSNFRVQPTESIVRFPNITNLCPFGEVFNATRFASVYAWNRKRISNCVADYSVLYNSASFSTFKCYGVSPTKLNDLCFTNVYADSFVIRGDEVRQIAPGQTGKIADYNYKLPDDFTGCVIAWNSNNLDSKVGGNYNYLYRLFRKSNLKPFERDISTEIYQAGSTPCNGVEGFNCYFPLQSYGFQPTNGVGYQPYRVVVLSFELLHAPATVCGPKKSTPLVKNKCVNFNFNGLTGTGVLTESNKKFLPFQQFGRDIADTTDAVRDPQTLEILDITPCSFGGVSVITPGTNTSNQVAVLYQDVNCTEVPVAIHADQLTPTWRVYSTGSNVFQTRAGCLIGAEHVNNSYECDIPIGAGICASYQTQTNSPRRARSVASQSIIAYTMSLGAENSVAYSNNSIAIPTNFTISVTTEILPVSMTKTSVDCTMYICGDSTECSNLLLQYGSFCTQLNRALTGIAVEQDKNTQEVFAQVKQIYKTPPIKDFGGFNFSQILPDPSKPSKRSFIEDLLFNKVTLADAGFIKQYGDCLGDIAARDLICAQKFNGLTVLPPLLTDEMIAQYTSALLAGTITSGWTFGAGPALQIPFAMQMAYRFNGIGVTQNVLYENQKLIANQFNSAIGKIQDSLSSTPSALGKLQDVVNQNAQALNTLVKQLSSNFGAISSVLNDILSRLDKVEAEVQIDRLITGRLQSLQTYVTQQLIRAAEIRASANLAATKMSECVLGQSKRVDFCGKGYHLMSFPQSAPHGVVFLHVTYVPAQEKNFTTAPAICHDGKAHFPREGVFVSNGTHWFVTQRNFYEPQIITTDNTFVSGNCDVVIGIVNNTVYDPLQPELDSFKEELDKYFKNHTSPDVDLGDISGINASVVNIQKEIDRLNEVAKNLNESLIDLQELGKYEQYIKWPWYIWLGFIAGLIAIVMVTIMLCCMTSCCSCLKGCCSCGSCCKFDEDDSEPVLKGVKLHYT

SEQ ID NO: 257 - protein, 1273 aa, Artificial Sequence
  source: /note="Description of Artificial Sequence: Synthetic polypeptide"
MFVFLVLLPLVSSQCVNLTTRTQLPPAYTNSFTRGVYYPDKVFRSSVLHSTQDLFLPFFSNVTWFHAIHVSGTNGTKRFDNPVLPFNDGVYFASTEKSNIIRGWIFGTTLDSKTQSLLIVNNATNVVIKVCEFQFCNDPFLGVYYHKNNKSWMESEFRVYSSANNCTFEYVSQPFLMDLEGKQGNFKNLREFVFKNIDGYFKIYSKHTPINLVRDLPQGFSALEPLVDLPIGINITRFQTLLALHRSYLTPGDSSSGWTAGAAAYYVGYLQPRTFLLKYNENGTITDAVDCALDPLSETKCTLKSFTVEKGIYQTSNFRVQPTESIVRFPNITNLCPFGEVFNATRFASVYAWNRKRISNCVADYSVLYNSASFSTFKCYGVSPTKLNDLCFTNVYADSFVIRGDEVRQIAPGQTGKIADYNYKLPDDFTGCVIAWNSNNLDSKVGGNYNYLYRLFRKSNLKPFERDISTEIYQAGSTPCNGVEGFNCYFPLQSYGFQPTNGVGYQPYRVVVLSFELLHAPATVCGPKKSTNLVKNKCVNFNFNGLTGTGVLTESNKKFLPFQQFGRDIADTTDAVRDPQTLEILDITPCSFGGVSVITPGTNTSNQVAVLYQDVNCTEVPVAIHADQLTPTWRVYSTGSNVFQTRAGCLIGAEHVNNSYECDIPIGAGICASYQTQTNSPRRARSVASQSIIAYTMSLGAENSVAYSNNSIAIPTNFTISVTTEILPVSMTKTSVDCTMYICGDSTECSNLLLQYGSFCTQLNRALTGIAVEQDKNTQEVFAQVKQIYKTPPIKDFGGFNFSQILPDPSKPSKRSFIEDLLFNKVTLADAGFIKQYGDCLGDIAARDLICAQKFNGLTVLPPLLTDEMIAQYTSALLACTITSGWTCGAGPALQIPFAMQMAYRFNGIGVTQNVLYENQKLIANQFNSAIGKIQDSLSSTPSALGKLQDVVNQNAQALNTLVKQLSSNFGAISSVLNDILSRLDKVEAEVQIDRLITGRLQSLQTYVTQQLIRAAEIRASANLAATKMSECVLGQSKRVDFCGKGYHLMSFPQSAPHGVVFLHVTYVPAQEKNFTTAPAICHDGKAHFPREGVFVSNGTHWFVTQRNFYEPQIITTDNTFVSGNCDVVIGIVNNTVYDPLQPELDSFKEELDKYFKNHTSPDVDLGDISGINASVVNIQKEIDRLNEVAKNLNESLIDLQELGKYEQYIKWPWYIWLGFIAGLIAIVMVTIMLCCMTSCCSCLKGCCSCGSCCKFDEDDSEPVLKGVKLHYT

SEQ ID NO: 258 - protein, 1273 aa, Artificial Sequence
  source: /note="Description of Artificial Sequence: Synthetic polypeptide"
MFVFLVLLPLVSSQCVNLTTRTQLPPAYTNSFTRGVYYPDKVFRSSVLHSTQDLFLPFFSNVTWFHAIHVSGTNGTKRFDNPVLPFNDGVYFASTEKSNIIRGWIFGTTLDSKTQSLLIVNNATNVVIKVCEFQFCNDPFLGVYYHKNNKSWMESEFRVYSSANNCTFEYVSQPFLMDLEGKQGNFKNLREFVFKNIDGYFKIYSKHTPINLVRDLPQGFSALEPLVDLPIGINITRFQTLLALHRSYLTPGDSSSGWTAGAAAYYVGYLQPRTFLLKYNENGTITDAVDCALDPLSETKCTLKSFTVEKGIYQTSNFRVQPTESIVRFPNITNLCPFGEVFNATRFASVYAWNRKRISNCVADYSVLYNSASFSTFKCYGVSPTKLNDLCFTNVYADSFVIRGDEVRQIAPGQTGKIADYNYKLPDDFTGCVIAWNSNNLDSKVGGNYNYLYRLFRKSNLKPFERDISTEIYQAGSTPCNGVEGFNCYFPLQSYGFQPTNGVGYQPYRVVVLSFELLHAPATVCGPKKSTNLVKNKCVNFNFNGLTGTGVLTESNKKFLPFQQFGRDIADTTDAVRDPQTLEILDITPCSFGGVSVITPGTNTSNQVAVLYQDVNCTEVPVAIHADQLTPTWRVYSTGSNVFQTRAGCLIGAEHVNNSYECDIPIGAGICASYQTQTNSPRRARSVASQSIIAYTMSLGAENSVAYSNNSIAIPTNFTISVTTEILPVSMTKTSVDCTMYICGDSTECSNLLLQYGSFCTQLNRALTGIAVEQDKNTQEVFAQVKQIYKTPPIKDFGGFNFSQILPDPSKPSKRSFIEDLLFNKVTLADAGFIKQYGDCLGDIAARDLICAQKFNGLTVLPPLLTDEMIAQYTSALLAGTITCGWTFGAGPCLQIPFAMQMAYRFNGIGVTQNVLYENQKLIANQFNSAIGKIQDSLSSTPSALGKLQDVVNQNAQALNTLVKQLSSNFGAISSVLNDILSRLDKVEAEVQIDRLITGRLQSLQTYVTQQLIRAAEIRASANLAATKMSECVLGQSKRVDFCGKGYHLMSFPQSAPHGVVFLHVTYVPAQEKNFTTAPAICHDGKAHFPREGVFVSNGTHWFVTQRNFYEPQIITTDNTFVSGNCDVVIGIVNNTVYDPLQPELDSFKEELDKYFKNHTSPDVDLGDISGINASVVNIQKEIDRLNEVAKNLNESLIDLQELGKYEQYIKWPWYIWLGFIAGLIAIVMVTIMLCCMTSCCSCLKGCCSCGSCCKFDEDDSEPVLKGVKLHYT

SEQ ID NO: 259 - protein, 1273 aa, Artificial Sequence
  source: /note="Description of Artificial Sequence: Synthetic polypeptide"
MFVFLVLLPLVSSQCVNLTTRTQLPPAYTNSFTRGVYYPDKVFRSSVLHSTQDLFLPFFSNVTWFHAIHVSGTNGTKRFDNPVLPFNDGVYFASTEKSNIIRGWIFGTTLDSKTQSLLIVNNATNVVIKVCEFQFCNDPFLGVYYHKNNKSWMESEFRVYSSANNCTFEYVSQPFLMDLEGKQGNFKNLREFVFKNIDGYFKIYSKHTPINLVRDLPQGFSALEPLVDLPIGINITRFQTLLALHRSYLTPGDSSSGWTAGAAAYYVGYLQPRTFLLKYNENGTITDAVDCALDPLSETKCTLKSFTVEKGIYQTSNFRVQPTESIVRFPNITNLCPFGEVFNATRFASVYAWNRKRISNCVADYSVLYNSASFSTFKCYGVSPTKLNDLCFTNVYADSFVIRGDEVRQIAPGQTGKIADYNYKLPDDFTGCVIAWNSNNLDSKVGGNYNYLYRLFRKSNLKPFERDISTEIYQAGSTPCNGVEGFNCYFPLQSYGFQPTNGVGYQPYRVVVLSFELLHAPATVCGPKKSTNLVKNKCVNFNFNGLTGTGVLTESNKKFLPFQQFGRDIADITDAVRDPQTLEILDITPCSFGGVSVITPGTNTSNQVAVLYQNVNCTEVPVAIHADQLTPTWRVYSTGSNVFQTRAGCLIGAEHVNNSYECDIPIGAGICASYQTQTNSPRRARSVASQSIIAYTMSLGAENSVAYSNNSIAIPTNFTISVTTEILPVSMTKTSVDCTMYICGDSTECSNLLLQYGSFCTQLNRALTGIAVEQDKNTQEVFAQVKQIYKTPPIKDFGGFNFSQILPDPSKPSKRSFIEDLLFNKVTLADAGFIKQYGDCLGDIAARDLICAQKFNGLTVLPPLLTDEMIAQYTSALLAGTITSGWTFGAGAALQIPFAMQMAYRFNGIGVTQNVLYENQKLIANQFNSAIGKIQDSLSSTPSALGKLQDVVNQNAQALNTLVKQLSSNFGAISSVLNDILSRLDKVEAEVQIDRLITGRLQSLQTYVTQQLIRAAEIRASANLAATKMSECVLGQSKRVDFCGKGYHLMSFPQSAPHGVVFLHVTYVPAQEKNFTTAPAICHDGKAHFPREGVFVSNGTHWFVTQRNFYEPQIITTDNTFVSGNCDVVIGIVNNTVYDPLQPELDSFKEELDKYFKNHTSPDVDLGDISGINASVVNIQKEIDRLNEVAKNLNESLIDLQELGKYEQYIKWPWYIWLGFIAGLIAIVMVTIMLCCMTSCCSCLKGCCSCGSCCKFDEDDSEPVLKGVKLHYT

SEQ ID NO: 260 - protein, 1273 aa, Artificial Sequence
  source: /note="Description of Artificial Sequence: Synthetic polypeptide"
MFVFLVLLPLVSSQCVNLTTRTQLPPAYTNSFTRGVYYPDKVFRSSVLHSTQDLFLPFFSNVTWFHAIHVSGTNGTKRFDNPVLPFNDGVYFASTEKSNIIRGWIFGTTLDSKTQSLLIVNNATNVVIKVCEFQFCNDPFLGVYYHKNNKSWMESEFRVYSSANNCTFEYVSQPFLMDLEGKQGNFKNLREFVFKNIDGYFKIYSKHTPINLVRDLPQGFSALEPLVDLPIGINITRFQTLLALHRSYLTPGDSSSGWTAGAAAYYVGYLQPRTFLLKYNENGTITDAVDCALDPLSETKCTLKSFTVEKGIYQTSNFRVQPTESIVRFPNITNLCPFGEVFNATRFASVYAWNRKRISNCVADYSVLYNSASFSTFKCYGVSPTKLNDLCFTNVYADSFVIRGDEVRQIAPGQTGKIADYNYKLPDDFTGCVIAWNSNNLDSKVGGNYNYLYRLFRKSNLKPFERDISTEIYQAGSTPCNGVEGFNCYFPLQSYGFQPTNGVGYQPYRVVVLSFELLHAPATVCGPKKSTPLVKNKCVNFNFNGLTGTGVLTESNKKFLPFQQFGRDIADTTDAVRDPQTLEILDITPCSFGGVSVITPGTNTSNQVAVLYQNVNCTEVPVAIHADQLTPTWRVYSTGSNVFQTRAGCLIGAEHVNNSYECDIPIGAGICASYQTQTNSPRRARSVASQSIIAYTMSLGAENSVAYSNNSIAIPTNFTISVTTEILPVSMTKTSVDCTMYICGDSTECSNLLLQYGSFCTQLNRALTGIAVEQDKNTQEVFAQVKQIYKTPPIKDFGGFNFSQILPDPSKPSKRSFIEDLLFNKVTLADAGFIKQYGDCLGDIAARDLICAQKFNGLTVLPPLLTDEMIAQYTSALLAGTITSGWTFGAGAALQIPFAMQMAYRFNGIGVTQNVLYENQKLIANQFNSAIGKIQDSLSSTPSALGKLQDVVNQNAQALNTLVKQLSSNFGAISSVLNDILSRLDKVEAEVQIDRLITGRLQSLQTYVTQQLIRAAEIRASANLAATKMSECVLGQSKRVDFCGKGYHLMSFPQSAPHGVVFLHVTYVPAQEKNFTTAPAICHDGKAHFPREGVFVSNGTHWFVTQRNFYEPQIITTDNTFVSGNCDVVIGIVNNTVYDPLQPELDSFKEELDKYFKNHTSPDVDLGDISGINASVVNIQKEIDRLNEVAKNLNESLIDLQELGKYEQYIKWPWYIWLGFIAGLIAIVMVTIMLCCMTSCCSCLKGCCSCGSCCKFDEDDSEPVLKGVKLHYT

SEQ ID NO: 261 - protein, 1273 aa, Artificial Sequence
  source: /note="Description of Artificial Sequence: Synthetic polypeptide"
MFVFLVLLPLVSSQCVNLTTRTQLPPAYTNSFTRGVYYPDKVFRSSVLHSTQDLFLPFFSNVTWFHAIHVSGTNGTKRFDNPVLPFNDGVYFASTEKSNIIRGWIFGTTLDSKTQSLLIVNNATNVVIKVCEFQFCNDPFLGVYYHKNNKSWMESEFRVYSSANNCTFEYVSQPFLMDLEGKQGNFKNLREFVFKNIDGYFKIYSKHTPINLVRDLPQGFSALEPLVDLPIGINITRFQTLLALHRSYLTPGDSSSGWTAGAAAYYVGYLQPRTFLLKYNENGTITDAVDCALDPLSETKCTLKSFTVEKGIYQTSNFRVQPTESIVRFPNITNLCPFGEVFNATRFASVYAWNRKRISNCVADYSVLYNSASFSTFKCYGVSPTKLNDLCFTNVYADSFVIRGDEVRQIAPGQTGKIADYNYKLPDDFTGCVIAWNSNNLDSKVGGNYNYLYRLFRKSNLKPFERDISTEIYQAGSTPCNGVEGFNCYFPLQSYGFQPTNGVGYQPYRVVVLSFELLHAPATVCGPKKSTNLVKNKCVNFNFNGLTGTGVLTESNKKFLPFQQFGRDIADTTDAVRDPQTLEILDITPCSFGGVSVITPGTNTSNQVAVLYQNVNCTEVPVAIHADQLTPTWRVYSTGSNVFQTRAGCLIGAEHVNNSYECDIPIGAGICASYQTQTNSPRRARSVASQSIIAYTMSLGAENSVAYSNNSIAIPTNFTISVTTEILPVSMTKTSVDCTMYICGDSTECSNLLLQYGSFCTQLNRALTGIAVEQDKNTQEVFAQVKQIYKTPPIKDFGGFNFSQILPDPSKPSKRSFIEDLLFNKVTLADAGFIKQYGDCLGDIAARDLICAQKFNGLTVLPPLLTDEMIAQYTSALLACTITSGWTCGAGAALQIPFAMQMAYRFNGIGVTQNVLYENQKLIANQFNSAIGKIQDSLSSTPSALGKLQDVVNQNAQALNTLVKQLSSNFGAISSVLNDILSRLDKVEAEVQIDRLITGRLQSLQTYVTQQLIRAAEIRASANLAATKMSECVLGQSKRVDFCGKGYHLMSFPQSAPHGVVFLHVTYVPAQEKNFTTAPAICHDGKAHFPREGVFVSNGTHWFVTQRNFYEPQIITTDNTFVSGNCDVVIGIVNNTVYDPLQPELDSFKEELDKYFKNHTSPDVDLGDISGINASVVNIQKEIDRLNEVAKNLNESLIDLQELGKYEQYIKWPWYIWLGFIAGLIAIVMVTIMLCCMTSCCSCLKGCCSCGSCCKFDEDDSEPVLKGVKLHYT

SEQ ID NO: 262 - protein, 1273 aa, Artificial Sequence
  source: /note="Description of Artificial Sequence: Synthetic polypeptide"
MFVFLVLLPLVSSQCVNLTTRTQLPPAYTNSFTRGVYYPDKVFRSSVLHSTQDLFLPFFSNVTWFHAIHVSGTNGTKRFDNPVLPFNDGVYFASTEKSNIIRGWIFGTTLDSKTQSLLIVNNATNVVIKVCEFQFCNDPFLGVYYHKNNKSWMESEFRVYSSANNCTFEYVSQPFLMDLEGKQGNFKNLREFVFKNIDGYFKIYSKHTPINLVRDLPQGFSALEPLVDLPIGINITRFQTLLALHRSYLTPGDSSSGWTAGAAAYYVGYLQPRTFLLKYNENGTITDAVDCALDPLSETKCTLKSFTVEKGIYQTSNFRVQPTESIVRFPNITNLCPFGEVFNATRFASVYAWNRKRISNCVADYSVLYNSASFSTFKCYGVSPTKLNDLCFTNVYADSFVIRGDEVRQIAPGQTGKIADYNYKLPDDFTGCVIAWNSNNLDSKVGGNYNYLYRLFRKSNLKPFERDISTEIYQAGSTPCNGVEGFNCYFPLQSYGFQPTNGVGYQPYRVVVLSFELLHAPATVCGPKKSTNLVKNKCVNFNFNGLTGTGVLTESNKKFLPFQQFGRDIADTTDAVRDPQTLEILDITPCSFGGVSVITPGTNTSNQVAVLYQNVNCTEVPVAIHADQLTPTWRVYSTGSNVFQTRAGCLIGAEHVNNSYECDIPIGAGICASYQTQTNSPRRARSVASQSIIAYTMSLGAENSVAYSNNSIAIPTNFTISVTTEILPVSMTKTSVDCTMYICGDSTECSNLLLQYGSFCTQLNRALTGIAVEQDKNTQEVFAQVKQIYKTPPIKDFGGFNFSQILPDPSKPSKRSFIEDLLFNKVTLADAGFIKQYGDCLGDIAARDLICAQKFNGLTVLPPLLTDEMIAQYTSALLAGTITCGWTFGAGACLQIPFAMQMAYRFNGIGVTQNVLYENQKLIANQFNSAIGKIQDSLSSTPSALGKLQDVVNQNAQALNTLVKQLSSNFGAISSVLNDILSRLDKVEAEVQIDRLITGRLQSLQTYVTQQLIRAAEIRASANLAATKMSECVLGQSKRVDFCGKGYHLMSFPQSAPHGVVFLHVTYVPAQEKNFTTAPAICHDGKAHFPREGVFVSNGTHWFVTQRNFYEPQIITTDNTFVSGNCDVVIGIVNNTVYDPLQPELDSFKEELDKYFKNHTSPDVDLGDISGINASVVNIQKEIDRLNEVAKNLNESLIDLQELGKYEQYIKWPWYIWLGFIAGLIAIVMVTIMLCCMTSCCSCLKGCCSCGSCCKFDEDDSEPVLKGVKLHYT

SEQ ID NO: 263 - protein, 1273 aa, Artificial Sequence
  source: /note="Description of Artificial Sequence: Synthetic polypeptide"
MFVFLVLLPLVSSQCVNLTTRTQLPPAYTNSFTRGVYYPDKVFRSSVLHSTQDLFLPFFSNVTWFHAIHVSGTNGTKRFDNPVLPFNDGVYFASTEKSNIIRGWIFGTTLDSKTQSLLIVNNATNVVIKVCEFQFCNDPFLGVYYHKNNKSWMESEFRVYSSANNCTFEYVSQPFLMDLEGKQGNFKNLREFVFKNIDGYFKIYSKHTPINLVRDLPQGFSALEPLVDLPIGINITRFQTLLALHRSYLTPGDSSSGWTAGAAAYYVGYLQPRTFLLKYNENGTITDAVDCALDPLSETKCTLKSFTVEKGIYQTSNFRVQPTESIVRFPNITNLCPFGEVFNATRFASVYAWNRKRISNCVADYSVLYNSASFSTFKCYGVSPTKLNDLCFTNVYADSFVIRGDEVRQIAPGQTGKIADYNYKLPDDFTGCVIAWNSNNLDSKVGGNYNYLYRLFRKSNLKPFERDISTEIYQAGSTPCNGVEGFNCYFPLQSYGFQPTNGVGYQPYRVVVLSFELLHAPATVCGPKKSTPLVKNKCVNFNFNGLTGTGVLTESNKKFLPFQQFGRDIADITDAVRDPQTLEILDITPCSFGGVSVITPGTNTSNQVAVLYQDVNCTEVPVAIHADQLTPTWRVYSTGSNVFQTRAGCLIGAEHVNNSYECDIPIGAGICASYQTQTNSPRRARSVASQSIIAYTMSLGAENSVAYSNNSIAIPTNFTISVTTEILPVSMTKTSVDCTMYICGDSTECSNLLLQYGSFCTQLNRALTGIAVEQDKNTQEVFAQVKQIYKTPPIKDFGGFNFSQILPDPSKPSKRSFIEDLLFNKVTLADAGFIKQYGDCLGDIAARDLICAQKFNGLTVLPPLLTDEMIAQYTSALLAGTITSGWTFGAGAALQIPFAMQMAYRFNGIGVTQNVLYENQKLIANQFNSAIGKIQDSLSSTPSALGKLQDVVNQNAQALNTLVKQLSSNFGAISSVLNDILSRLDKVEAEVQIDRLITGRLQSLQTYVTQQLIRAAEIRASANLAATKMSECVLGQSKRVDFCGKGYHLMSFPQSAPHGVVFLHVTYVPAQEKNFTTAPAICHDGKAHFPREGVFVSNGTHWFVTQRNFYEPQIITTDNTFVSGNCDVVIGIVNNTVYDPLQPELDSFKEELDKYFKNHTSPDVDLGDISGINASVVNIQKEIDRLNEVAKNLNESLIDLQELGKYEQYIKWPWYIWLGFIAGLIAIVMVTIMLCCMTSCCSCLKGCCSCGSCCKFDEDDSEPVLKGVKLHYT

SEQ ID NO: 264 - protein, 1273 aa, Artificial Sequence
  source: /note="Description of Artificial Sequence: Synthetic polypeptide"
MFVFLVLLPLVSSQCVNLTTRTQLPPAYTNSFTRGVYYPDKVFRSSVLHSTQDLFLPFFSNVTWFHAIHVSGTNGTKRFDNPVLPFNDGVYFASTEKSNIIRGWIFGTTLDSKTQSLLIVNNATNVVIKVCEFQFCNDPFLGVYYHKNNKSWMESEFRVYSSANNCTFEYVSQPFLMDLEGKQGNFKNLREFVFKNIDGYFKIYSKHTPINLVRDLPQGFSALEPLVDLPIGINITRFQTLLALHRSYLTPGDSSSGWTAGAAAYYVGYLQPRTFLLKYNENGTITDAVDCALDPLSETKCTLKSFTVEKGIYQTSNFRVQPTESIVRFPNITNLCPFGEVFNATRFASVYAWNRKRISNCVADYSVLYNSASFSTFKCYGVSPTKLNDLCFTNVYADSFVIRGDEVRQIAPGQTGKIADYNYKLPDDFTGCVIAWNSNNLDSKVGGNYNYLYRLFRKSNLKPFERDISTEIYQAGSTPCNGVEGFNCYFPLQSYGFQPTNGVGYQPYRVVVLSFELLHAPATVCGPKKSTNLVKNKCVNFNFNGLTGTGVLTESNKKFLPFQQFGRDIADITDAVRDPQTLEILDITPCSFGGVSVITPGTNTSNQVAVLYQDVNCTEVPVAIHADQLTPTWRVYSTGSNVFQTRAGCLIGAEHVNNSYECDIPIGAGICASYQTQTNSPRRARSVASQSIIAYTMSLGAENSVAYSNNSIAIPTNFTISVTTEILPVSMTKTSVDCTMYICGDSTECSNLLLQYGSFCTQLNRALTGIAVEQDKNTQEVFAQVKQIYKTPPIKDFGGFNFSQILPDPSKPSKRSFIEDLLFNKVTLADAGFIKQYGDCLGDIAARDLICAQKFNGLTVLPPLLTDEMIAQYTSALLACTITSGWTCGAGAALQIPFAMQMAYRFNGIGVTQNVLYENQKLIANQFNSAIGKIQDSLSSTPSALGKLQDVVNQNAQALNTLVKQLSSNFGAISSVLNDILSRLDKVEAEVQIDRLITGRLQSLQTYVTQQLIRAAEIRASANLAATKMSECVLGQSKRVDFCGKGYHLMSFPQSAPHGVVFLHVTYVPAQEKNFTTAPAICHDGKAHFPREGVFVSNGTHWFVTQRNFYEPQIITTDNTFVSGNCDVVIGIVNNTVYDPLQPELDSFKEELDKYFKNHTSPDVDLGDISGINASVVNIQKEIDRLNEVAKNLNESLIDLQELGKYEQYIKWPWYIWLGFIAGLIAIVMVTIMLCCMTSCCSCLKGCCSCGSCCKFDEDDSEPVLKGVKLHYT

SEQ ID NO: 265 - protein, 1273 aa, Artificial Sequence
  source: /note="Description of Artificial Sequence: Synthetic polypeptide"
MFVFLVLLPLVSSQCVNLTTRTQLPPAYTNSFTRGVYYPDKVFRSSVLHSTQDLFLPFFSNVTWFHAIHVSGTNGTKRFDNPVLPFNDGVYFASTEKSNIIRGWIFGTTLDSKTQSLLIVNNATNVVIKVCEFQFCNDPFLGVYYHKNNKSWMESEFRVYSSANNCTFEYVSQPFLMDLEGKQGNFKNLREFVFKNIDGYFKIYSKHTPINLVRDLPQGFSALEPLVDLPIGINITRFQTLLALHRSYLTPGDSSSGWTAGAAAYYVGYLQPRTFLLKYNENGTITDAVDCALDPLSETKCTLKSFTVEKGIYQTSNFRVQPTESIVRFPNITNLCPFGEVFNATRFASVYAWNRKRISNCVADYSVLYNSASFSTFKCYGVSPTKLNDLCFTNVYADSFVIRGDEVRQIAPGQTGKIADYNYKLPDDFTGCVIAWNSNNLDSKVGGNYNYLYRLFRKSNLKPFERDISTEIYQAGSTPCNGVEGFNCYFPLQSYGFQPTNGVGYQPYRVVVLSFELLHAPATVCGPKKSTNLVKNKCVNFNFNGLTGTGVLTESNKKFLPFQQFGRDIADITDAVRDPQTLEILDITPCSFGGVSVITPGTNTSNQVAVLYQDVNCTEVPVAIHADQLTPTWRVYSTGSNVFQTRAGCLIGAEHVNNSYECDIPIGAGICASYQTQTNSPRRARSVASQSIIAYTMSLGAENSVAYSNNSIAIPTNFTISVTTEILPVSMTKTSVDCTMYICGDSTECSNLLLQYGSFCTQLNRALTGIAVEQDKNTQEVFAQVKQIYKTPPIKDFGGFNFSQILPDPSKPSKRSFIEDLLFNKVTLADAGFIKQYGDCLGDIAARDLICAQKFNGLTVLPPLLTDEMIAQYTSALLAGTITCGWTFGAGACLQIPFAMQMAYRFNGIGVTQNVLYENQKLIANQFNSAIGKIQDSLSSTPSALGKLQDVVNQNAQALNTLVKQLSSNFGAISSVLNDILSRLDKVEAEVQIDRLITGRLQSLQTYVTQQLIRAAEIRASANLAATKMSECVLGQSKRVDFCGKGYHLMSFPQSAPHGVVFLHVTYVPAQEKNFTTAPAICHDGKAHFPREGVFVSNGTHWFVTQRNFYEPQIITTDNTFVSGNCDVVIGIVNNTVYDPLQPELDSFKEELDKYFKNHTSPDVDLGDISGINASVVNIQKEIDRLNEVAKNLNESLIDLQELGKYEQYIKWPWYIWLGFIAGLIAIVMVTIMLCCMTSCCSCLKGCCSCGSCCKFDEDDSEPVLKGVKLHYT

SEQ ID NO: 266 - protein, 1273 aa, Artificial Sequence
  source: /note="Description of Artificial Sequence: Synthetic polypeptide"
MFVFLVLLPLVSSQCVNLTTRTQLPPAYTNSFTRGVYYPDKVFRSSVLHSTQDLFLPFFSNVTWFHAIHVSGTNGTKRFDNPVLPFNDGVYFASTEKSNIIRGWIFGTTLDSKTQSLLIVNNATNVVIKVCEFQFCNDPFLGVYYHKNNKSWMESEFRVYSSANNCTFEYVSQPFLMDLEGKQGNFKNLREFVFKNIDGYFKIYSKHTPINLVRDLPQGFSALEPLVDLPIGINITRFQTLLALHRSYLTPGDSSSGWTAGAAAYYVGYLQPRTFLLKYNENGTITDAVDCALDPLSETKCTLKSFTVEKGIYQTSNFRVQPTESIVRFPNITNLCPFGEVFNATRFASVYAWNRKRISNCVADYSVLYNSASFSTFKCYGVSPTKLNDLCFTNVYADSFVIRGDEVRQIAPGQTGKIADYNYKLPDDFTGCVIAWNSNNLDSKVGGNYNYLYRLFRKSNLKPFERDISTEIYQAGSTPCNGVEGFNCYFPLQSYGFQPTNGVGYQPYRVVVLSFELLHAPATVCGPKKSTPLVKNKCVNFNFNGLTGTGVLTESNKKFLPFQQFGRDIADTTDAVRDPQTLEILDITPCSFGGVSVITPGTNTSNQVAVLYQDVNCTEVPVAIHADQLTPTWRVYSTGSNVFQTRAGCLIGAEHVNNSYECDIPIGAGICASYQTQTNSPRRARSVASQSIIAYTMSLGAENSVAYSNNSIAIPTNFTISVTTEILPVSMTKTSVDCTMYICGDSTECSNLLLQYGSFCTQLNRALTGIAVEQDKNTQEVFAQVKQIYKTPPIKDFGGFNFSQILPDPSKPSKRSFIEDLLFNKVTLADAGFIKQYGDCLGDIAARDLICAQKFNGLTVLPPLLTDEMIAQYTSALLACTITSGWTCGAGAALQIPFAMQMAYRFNGIGVTQNVLYENQKLIANQFNSAIGKIQDSLSSTPSALGKLQDVVNQNAQALNTLVKQLSSNFGAISSVLNDILSRLDKVEAEVQIDRLITGRLQSLQTYVTQQLIRAAEIRASANLAATKMSECVLGQSKRVDFCGKGYHLMSFPQSAPHGVVFLHVTYVPAQEKNFTTAPAICHDGKAHFPREGVFVSNGTHWFVTQRNFYEPQIITTDNTFVSGNCDVVIGIVNNTVYDPLQPELDSFKEELDKYFKNHTSPDVDLGDISGINASVVNIQKEIDRLNEVAKNLNESLIDLQELGKYEQYIKWPWYIWLGFIAGLIAIVMVTIMLCCMTSCCSCLKGCCSCGSCCKFDEDDSEPVLKGVKLHYT

SEQ ID NO: 267 - protein, 1273 aa, Artificial Sequence
  source: /note="Description of Artificial Sequence: Synthetic polypeptide"
MFVFLVLLPLVSSQCVNLTTRTQLPPAYTNSFTRGVYYPDKVFRSSVLHSTQDLFLPFFSNVTWFHAIHVSGTNGTKRFDNPVLPFNDGVYFASTEKSNIIRGWIFGTTLDSKTQSLLIVNNATNVVIKVCEFQFCNDPFLGVYYHKNNKSWMESEFRVYSSANNCTFEYVSQPFLMDLEGKQGNFKNLREFVFKNIDGYFKIYSKHTPINLVRDLPQGFSALEPLVDLPIGINITRFQTLLALHRSYLTPGDSSSGWTAGAAAYYVGYLQPRTFLLKYNENGTITDAVDCALDPLSETKCTLKSFTVEKGIYQTSNFRVQPTESIVRFPNITNLCPFGEVFNATRFASVYAWNRKRISNCVADYSVLYNSASFSTFKCYGVSPTKLNDLCFTNVYADSFVIRGDEVRQIAPGQTGKIADYNYKLPDDFTGCVIAWNSNNLDSKVGGNYNYLYRLFRKSNLKPFERDISTEIYQAGSTPCNGVEGFNCYFPLQSYGFQPTNGVGYQPYRVVVLSFELLHAPATVCGPKKSTPLVKNKCVNFNFNGLTGTGVLTESNKKFLPFQQFGRDIADTTDAVRDPQTLEILDITPCSFGGVSVITPGTNTSNQVAVLYQDVNCTEVPVAIHADQLTPTWRVYSTGSNVFQTRAGCLIGAEHVNNSYECDIPIGAGICASYQTQTNSPRRARSVASQSIIAYTMSLGAENSVAYSNNSIAIPTNFTISVTTEILPVSMTKTSVDCTMYICGDSTECSNLLLQYGSFCTQLNRALTGIAVEQDKNTQEVFAQVKQIYKTPPIKDFGGFNFSQILPDPSKPSKRSFIEDLLFNKVTLADAGFIKQYGDCLGDIAARDLICAQKFNGLTVLPPLLTDEMIAQYTSALLAGTITCGWTFGAGACLQIPFAMQMAYRFNGIGVTQNVLYENQKLIANQFNSAIGKIQDSLSSTPSALGKLQDVVNQNAQALNTLVKQLSSNFGAISSVLNDILSRLDKVEAEVQIDRLITGRLQSLQTYVTQQLIRAAEIRASANLAATKMSECVLGQSKRVDFCGKGYHLMSFPQSAPHGVVFLHVTYVPAQEKNFTTAPAICHDGKAHFPREGVFVSNGTHWFVTQRNFYEPQIITTDNTFVSGNCDVVIGIVNNTVYDPLQPELDSFKEELDKYFKNHTSPDVDLGDISGINASVVNIQKEIDRLNEVAKNLNESLIDLQELGKYEQYIKWPWYIWLGFIAGLIAIVMVTIMLCCMTSCCSCLKGCCSCGSCCKFDEDDSEPVLKGVKLHYT

SEQ ID NO: 268 - protein, 1273 aa, Artificial Sequence
  source: /note="Description of Artificial Sequence: Synthetic polypeptide"
MFVFLVLLPLVSSQCVNLTTRTQLPPAYTNSFTRGVYYPDKVFRSSVLHSTQDLFLPFFSNVTWFHAIHVSGTNGTKRFDNPVLPFNDGVYFASTEKSNIIRGWIFGTTLDSKTQSLLIVNNATNVVIKVCEFQFCNDPFLGVYYHKNNKSWMESEFRVYSSANNCTFEYVSQPFLMDLEGKQGNFKNLREFVFKNIDGYFKIYSKHTPINLVRDLPQGFSALEPLVDLPIGINITRFQTLLALHRSYLTPGDSSSGWTAGAAAYYVGYLQPRTFLLKYNENGTITDAVDCALDPLSETKCTLKSFTVEKGIYQTSNFRVQPTESIVRFPNITNLCPFGEVFNATRFASVYAWNRKRISNCVADYSVLYNSASFSTFKCYGVSPTKLNDLCFTNVYADSFVIRGDEVRQIAPGQTGKIADYNYKLPDDFTGCVIAWNSNNLDSKVGGNYNYLYRLFRKSNLKPFERDISTEIYQAGSTPCNGVEGFNCYFPLQSYGFQPTNGVGYQPYRVVVLSFELLHAPATVCGPKKSTNLVKNKCVNFNFNGLTGTGVLTESNKKFLPFQQFGRDIADITDAVRDPQTLEILDITPCSFGGVSVITPGTNTSNQVAVLYQNVNCTEVPVAIHADQLTPTWRVYSTGSNVFQTRAGCLIGAEHVNNSYECDIPIGAGICASYQTQTNSPRRARSVASQSIIAYTMSLGAENSVAYSNNSIAIPTNFTISVTTEILPVSMTKTSVDCTMYICGDSTECSNLLLQYGSFCTQLNRALTGIAVEQDKNTQEVFAQVKQIYKTPPIKDFGGFNFSQILPDPSKPSKRSFIEDLLFNKVTLADAGFIKQYGDCLGDIAARDLICAQKFNGLTVLPPLLTDEMIAQYTSALLAGTITSGWTFGAGPALQIPFAMQMAYRFNGIGVTQNVLYENQKLIANQFNSAIGKIQDSLSSTASALGKLQDVVNQNAQALNTLVKQLSSNFGAISSVLNDILSRLDKVEAEVQIDRLITGRLQSLQTYVTQQLIRAAEIRASANLAATKMSECVLGQSKRVDFCGKGYHLMSFPQSAPHGVVFLHVTYVPAQEKNFTTAPAICHDGKAHFPREGVFVSNGTHWFVTQRNFYEPQIITTDNTFVSGNCDVVIGIVNNTVYDPLQPELDSFKEELDKYFKNHTSPDVDLGDISGINASVVNIQKEIDRLNEVAKNLNESLIDLQELGKYEQYIKWPWYIWLGFIAGLIAIVMVTIMLCCMTSCCSCLKGCCSCGSCCKFDEDDSEPVLKGVKLHYT

SEQ ID NO: 269 - protein, 1273 aa, Artificial Sequence
  source: /note="Description of Artificial Sequence: Synthetic polypeptide"
MFVFLVLLPLVSSQCVNLTTRTQLPPAYTNSFTRGVYYPDKVFRSSVLHSTQDLFLPFFSNVTWFHAIHVSGTNGTKRFDNPVLPFNDGVYFASTEKSNIIRGWIFGTTLDSKTQSLLIVNNATNVVIKVCEFQFCNDPFLGVYYHKNNKSWMESEFRVYSSANNCTFEYVSQPFLMDLEGKQGNFKNLREFVFKNIDGYFKIYSKHTPINLVRDLPQGFSALEPLVDLPIGINITRFQTLLALHRSYLTPGDSSSGWTAGAAAYYVGYLQPRTFLLKYNENGTITDAVDCALDPLSETKCTLKSFTVEKGIYQTSNFRVQPTESIVRFPNITNLCPFGEVFNATRFASVYAWNRKRISNCVADYSVLYNSASFSTFKCYGVSPTKLNDLCFTNVYADSFVIRGDEVRQIAPGQTGKIADYNYKLPDDFTGCVIAWNSNNLDSKVGGNYNYLYRLFRKSNLKPFERDISTEIYQAGSTPCNGVEGFNCYFPLQSYGFQPTNGVGYQPYRVVVLSFELLHAPATVCGPKKSTPLVKNKCVNFNFNGLTGTGVLTESNKKFLPFQQFGRDIADTTDAVRDPQTLEILDITPCSFGGVSVITPGTNTSNQVAVLYQNVNCTEVPVAIHADQLTPTWRVYSTGSNVFQTRAGCLIGAEHVNNSYECDIPIGAGICASYQTQTNSPRRARSVASQSIIAYTMSLGAENSVAYSNNSIAIPTNFTISVTTEILPVSMTKTSVDCTMYICGDSTECSNLLLQYGSFCTQLNRALTGIAVEQDKNTQEVFAQVKQIYKTPPIKDFGGFNFSQILPDPSKPSKRSFIEDLLFNKVTLADAGFIKQYGDCLGDIAARDLICAQKFNGLTVLPPLLTDEMIAQYTSALLAGTITSGWTFGAGPALQIPFAMQMAYRFNGIGVTQNVLYENQKLIANQFNSAIGKIQDSLSSTASALGKLQDVVNQNAQALNTLVKQLSSNFGAISSVLNDILSRLDKVEAEVQIDRLITGRLQSLQTYVTQQLIRAAEIRASANLAATKMSECVLGQSKRVDFCGKGYHLMSFPQSAPHGVVFLHVTYVPAQEKNFTTAPAICHDGKAHFPREGVFVSNGTHWFVTQRNFYEPQIITTDNTFVSGNCDVVIGIVNNTVYDPLQPELDSFKEELDKYFKNHTSPDVDLGDISGINASVVNIQKEIDRLNEVAKNLNESLIDLQELGKYEQYIKWPWYIWLGFIAGLIAIVMVTIMLCCMTSCCSCLKGCCSCGSCCKFDEDDSEPVLKGVKLHYT

SEQ ID NO: 270 - protein, 1273 aa, Artificial Sequence
  source: /note="Description of Artificial Sequence: Synthetic polypeptide"
MFVFLVLLPLVSSQCVNLTTRTQLPPAYTNSFTRGVYYPDKVFRSSVLHSTQDLFLPFFSNVTWFHAIHVSGTNGTKRFDNPVLPFNDGVYFASTEKSNIIRGWIFGTTLDSKTQSLLIVNNATNVVIKVCEFQFCNDPFLGVYYHKNNKSWMESEFRVYSSANNCTFEYVSQPFLMDLEGKQGNFKNLREFVFKNIDGYFKIYSKHTPINLVRDLPQGFSALEPLVDLPIGINITRFQTLLALHRSYLTPGDSSSGWTAGAAAYYVGYLQPRTFLLKYNENGTITDAVDCALDPLSETKCTLKSFTVEKGIYQTSNFRVQPTESIVRFPNITNLCPFGEVFNATRFASVYAWNRKRISNCVADYSVLYNSASFSTFKCYGVSPTKLNDLCFTNVYADSFVIRGDEVRQIAPGQTGKIADYNYKLPDDFTGCVIAWNSNNLDSKVGGNYNYLYRLFRKSNLKPFERDISTEIYQAGSTPCNGVEGFNCYFPLQSYGFQPTNGVGYQPYRVVVLSFELLHAPATVCGPKKSTNLVKNKCVNFNFNGLTGTGVLTESNKKFLPFQQFGRDIADTTDAVRDPQTLEILDITPCSFGGVSVITPGTNTSNQVAVLYQNVNCTEVPVAIHADQLTPTWRVYSTGSNVFQTRAGCLIGAEHVNNSYECDIPIGAGICASYQTQTNSPRRARSVASQSIIAYTMSLGAENSVAYSNNSIAIPTNFTISVTTEILPVSMTKTSVDCTMYICGDSTECSNLLLQYGSFCTQLNRALTGIAVEQDKNTQEVFAQVKQIYKTPPIKDFGGFNFSQILPDPSKPSKRSFIEDLLFNKVTLADAGFIKQYGDCLGDIAARDLICAQKFNGLTVLPPLLTDEMIAQYTSALLACTITSGWTCGAGPALQIPFAMQMAYRFNGIGVTQNVLYENQKLIANQFNSAIGKIQDSLSSTASALGKLQDVVNQNAQALNTLVKQLSSNFGAISSVLNDILSRLDKVEAEVQIDRLITGRLQSLQTYVTQQLIRAAEIRASANLAATKMSECVLGQSKRVDFCGKGYHLMSFPQSAPHGVVFLHVTYVPAQEKNFTTAPAICHDGKAHFPREGVFVSNGTHWFVTQRNFYEPQIITTDNTFVSGNCDVVIGIVNNTVYDPLQPELDSFKEELDKYFKNHTSPDVDLGDISGINASVVNIQKEIDRLNEVAKNLNESLIDLQELGKYEQYIKWPWYIWLGFIAGLIAIVMVTIMLCCMTSCCSCLKGCCSCGSCCKFDEDDSEPVLKGVKLHYT

SEQ ID NO: 271 - protein, 1273 aa, Artificial Sequence
  source: /note="Description of Artificial Sequence: Synthetic polypeptide"
MFVFLVLLPLVSSQCVNLTTRTQLPPAYTNSFTRGVYYPDKVFRSSVLHSTQDLFLPFFSNVTWFHAIHVSGTNGTKRFDNPVLPFNDGVYFASTEKSNIIRGWIFGTTLDSKTQSLLIVNNATNVVIKVCEFQFCNDPFLGVYYHKNNKSWMESEFRVYSSANNCTFEYVSQPFLMDLEGKQGNFKNLREFVFKNIDGYFKIYSKHTPINLVRDLPQGFSALEPLVDLPIGINITRFQTLLALHRSYLTPGDSSSGWTAGAAAYYVGYLQPRTFLLKYNENGTITDAVDCALDPLSETKCTLKSFTVEKGIYQTSNFRVQPTESIVRFPNITNLCPFGEVFNATRFASVYAWNRKRISNCVADYSVLYNSASFSTFKCYGVSPTKLNDLCFTNVYADSFVIRGDEVRQIAPGQTGKIADYNYKLPDDFTGCVIAWNSNNLDSKVGGNYNYLYRLFRKSNLKPFERDISTEIYQAGSTPCNGVEGFNCYFPLQSYGFQPTNGVGYQPYRVVVLSFELLHAPATVCGPKKSTNLVKNKCVNFNFNGLTGTGVLTESNKKFLPFQQFGRDIADTTDAVRDPQTLEILDITPCSFGGVSVITPGTNTSNQVAVLYQNVNCTEVPVAIHADQLTPTWRVYSTGSNVFQTRAGCLIGAEHVNNSYECDIPIGAGICASYQTQTNSPRRARSVASQSIIAYTMSLGAENSVAYSNNSIAIPTNFTISVTTEILPVSMTKTSVDCTMYICGDSTECSNLLLQYGSFCTQLNRALTGIAVEQDKNTQEVFAQVKQIYKTPPIKDFGGFNFSQILPDPSKPSKRSFIEDLLFNKVTLADAGFIKQYGDCLGDIAARDLICAQKFNGLTVLPPLLTDEMIAQYTSALLAGTITCGWTFGAGPCLQIPFAMQMAYRFNGIGVTQNVLYENQKLIANQFNSAIGKIQDSLSSTASALGKLQDVVNQNAQALNTLVKQLSSNFGAISSVLNDILSRLDKVEAEVQIDRLITGRLQSLQTYVTQQLIRAAEIRASANLAATKMSECVLGQSKRVDFCGKGYHLMSFPQSAPHGVVFLHVTYVPAQEKNFTTAPAICHDGKAHFPREGVFVSNGTHWFVTQRNFYEPQIITTDNTFVSGNCDVVIGIVNNTVYDPLQPELDSFKEELDKYFKNHTSPDVDLGDISGINASVVNIQKEIDRLNEVAKNLNESLIDLQELGKYEQYIKWPWYIWLGFIAGLIAIVMVTIMLCCMTSCCSCLKGCCSCGSCCKFDEDDSEPVLKGVKLHYT

SEQ ID NO: 272 - protein, 1273 aa, Artificial Sequence
  source: /note="Description of Artificial Sequence: Synthetic polypeptide"
MFVFLVLLPLVSSQCVNLTTRTQLPPAYTNSFTRGVYYPDKVFRSSVLHSTQDLFLPFFSNVTWFHAIHVSGTNGTKRFDNPVLPFNDGVYFASTEKSNIIRGWIFGTTLDSKTQSLLIVNNATNVVIKVCEFQFCNDPFLGVYYHKNNKSWMESEFRVYSSANNCTFEYVSQPFLMDLEGKQGNFKNLREFVFKNIDGYFKIYSKHTPINLVRDLPQGFSALEPLVDLPIGINITRFQTLLALHRSYLTPGDSSSGWTAGAAAYYVGYLQPRTFLLKYNENGTITDAVDCALDPLSETKCTLKSFTVEKGIYQTSNFRVQPTESIVRFPNITNLCPFGEVFNATRFASVYAWNRKRISNCVADYSVLYNSASFSTFKCYGVSPTKLNDLCFTNVYADSFVIRGDEVRQIAPGQTGKIADYNYKLPDDFTGCVIAWNSNNLDSKVGGNYNYLYRLFRKSNLKPFERDISTEIYQAGSTPCNGVEGFNCYFPLQSYGFQPTNGVGYQPYRVVVLSFELLHAPATVCGPKKSTPLVKNKCVNFNFNGLTGTGVLTESNKKFLPFQQFGRDIADITDAVRDPQTLEILDITPCSFGGVSVITPGTNTSNQVAVLYQDVNCTEVPVAIHADQLTPTWRVYSTGSNVFQTRAGCLIGAEHVNNSYECDIPIGAGICASYQTQTNSPRRARSVASQSIIAYTMSLGAENSVAYSNNSIAIPTNFTISVTTEILPVSMTKTSVDCTMYICGDSTECSNLLLQYGSFCTQLNRALTGIAVEQDKNTQEVFAQVKQIYKTPPIKDFGGFNFSQILPDPSKPSKRSFIEDLLFNKVTLADAGFIKQYGDCLGDIAARDLICAQKFNGLTVLPPLLTDEMIAQYTSALLAGTITSGWTFGAGPALQIPFAMQMAYRFNGIGVTQNVLYENQKLIANQFNSAIGKIQDSLSSTASALGKLQDVVNQNAQALNTLVKQLSSNFGAISSVLNDILSRLDKVEAEVQIDRLITGRLQSLQTYVTQQLIRAAEIRASANLAATKMSECVLGQSKRVDFCGKGYHLMSFPQSAPHGVVFLHVTYVPAQEKNFTTAPAICHDGKAHFPREGVFVSNGTHWFVTQRNFYEPQIITTDNTFVSGNCDVVIGIVNNTVYDPLQPELDSFKEELDKYFKNHTSPDVDLGDISGINASVVNIQKEIDRLNEVAKNLNESLIDLQELGKYEQYIKWPWYIWLGFIAGLIAIVMVTIMLCCMTSCCSCLKGCCSCGSCCKFDEDDSEPVLKGVKLHYT

SEQ ID NO: 273 - protein, 1273 aa, Artificial Sequence
  source: /note="Description of Artificial Sequence: Synthetic polypeptide"
MFVFLVLLPLVSSQCVNLTTRTQLPPAYTNSFTRGVYYPDKVFRSSVLHSTQDLFLPFFSNVTWFHAIHVSGTNGTKRFDNPVLPFNDGVYFASTEKSNIIRGWIFGTTLDSKTQSLLIVNNATNVVIKVCEFQFCNDPFLGVYYHKNNKSWMESEFRVYSSANNCTFEYVSQPFLMDLEGKQGNFKNLREFVFKNIDGYFKIYSKHTPINLVRDLPQGFSALEPLVDLPIGINITRFQTLLALHRSYLTPGDSSSGWTAGAAAYYVGYLQPRTFLLKYNENGTITDAVDCALDPLSETKCTLKSFTVEKGIYQTSNFRVQPTESIVRFPNITNLCPFGEVFNATRFASVYAWNRKRISNCVADYSVLYNSASFSTFKCYGVSPTKLNDLCFTNVYADSFVIRGDEVRQIAPGQTGKIADYNYKLPDDFTGCVIAWNSNNLDSKVGGNYNYLYRLFRKSNLKPFERDISTEIYQAGSTPCNGVEGFNCYFPLQSYGFQPTNGVGYQPYRVVVLSFELLHAPATVCGPKKSTNLVKNKCVNFNFNGLTGTGVLTESNKKFLPFQQFGRDIADITDAVRDPQTLEILDITPCSFGGVSVITPGTNTSNQVAVLYQDVNCTEVPVAIHADQLTPTWRVYSTGSNVFQTRAGCLIGAEHVNNSYECDIPIGAGICASYQTQTNSPRRARSVASQSIIAYTMSLGAENSVAYSNNSIAIPTNFTISVTTEILPVSMTKTSVDCTMYICGDSTECSNLLLQYGSFCTQLNRALTGIAVEQDKNTQEVFAQVKQIYKTPPIKDFGGFNFSQILPDPSKPSKRSFIEDLLFNKVTLADAGFIKQYGDCLGDIAARDLICAQKFNGLTVLPPLLTDEMIAQYTSALLACTITSGWTCGAGPALQIPFAMQMAYRFNGIGVTQNVLYENQKLIANQFNSAIGKIQDSLSSTASALGKLQDVVNQNAQALNTLVKQLSSNFGAISSVLNDILSRLDKVEAEVQIDRLITGRLQSLQTYVTQQLIRAAEIRASANLAATKMSECVLGQSKRVDFCGKGYHLMSFPQSAPHGVVFLHVTYVPAQEKNFTTAPAICHDGKAHFPREGVFVSNGTHWFVTQRNFYEPQIITTDNTFVSGNCDVVIGIVNNTVYDPLQPELDSFKEELDKYFKNHTSPDVDLGDISGINASVVNIQKEIDRLNEVAKNLNESLIDLQELGKYEQYIKWPWYIWLGFIAGLIAIVMVTIMLCCMTSCCSCLKGCCSCGSCCKFDEDDSEPVLKGVKLHYT

SEQ ID NO: 274 - protein, 1273 aa, Artificial Sequence
  source: /note="Description of Artificial Sequence: Synthetic polypeptide"
MFVFLVLLPLVSSQCVNLTTRTQLPPAYTNSFTRGVYYPDKVFRSSVLHSTQDLFLPFFSNVTWFHAIHVSGTNGTKRFDNPVLPFNDGVYFASTEKSNIIRGWIFGTTLDSKTQSLLIVNNATNVVIKVCEFQFCNDPFLGVYYHKNNKSWMESEFRVYSSANNCTFEYVSQPFLMDLEGKQGNFKNLREFVFKNIDGYFKIYSKHTPINLVRDLPQGFSALEPLVDLPIGINITRFQTLLALHRSYLTPGDSSSGWTAGAAAYYVGYLQPRTFLLKYNENGTITDAVDCALDPLSETKCTLKSFTVEKGIYQTSNFRVQPTESIVRFPNITNLCPFGEVFNATRFASVYAWNRKRISNCVADYSVLYNSASFSTFKCYGVSPTKLNDLCFTNVYADSFVIRGDEVRQIAPGQTGKIADYNYKLPDDFTGCVIAWNSNNLDSKVGGNYNYLYRLFRKSNLKPFERDISTEIYQAGSTPCNGVEGFNCYFPLQSYGFQPTNGVGYQPYRVVVLSFELLHAPATVCGPKKSTNLVKNKCVNFNFNGLTGTGVLTESNKKFLPFQQFGRDIADITDAVRDPQTLEILDITPCSFGGVSVITPGTNTSNQVAVLYQDVNCTEVPVAIHADQLTPTWRVYSTGSNVFQTRAGCLIGAEHVNNSYECDIPIGAGICASYQTQTNSPRRARSVASQSIIAYTMSLGAENSVAYSNNSIAIPTNFTISVTTEILPVSMTKTSVDCTMYICGDSTECSNLLLQYGSFCTQLNRALTGIAVEQDKNTQEVFAQVKQIYKTPPIKDFGGFNFSQILPDPSKPSKRSFIEDLLFNKVTLADAGFIKQYGDCLGDIAARDLICAQKFNGLTVLPPLLTDEMIAQYTSALLAGTITCGWTFGAGPCLQIPFAMQMAYRFNGIGVTQNVLYENQKLIANQFNSAIGKIQDSLSSTASALGKLQDVVNQNAQALNTLVKQLSSNFGAISSVLNDILSRLDKVEAEVQIDRLITGRLQSLQTYVTQQLIRAAEIRASANLAATKMSECVLGQSKRVDFCGKGYHLMSFPQSAPHGVVFLHVTYVPAQEKNFTTAPAICHDGKAHFPREGVFVSNGTHWFVTQRNFYEPQIITTDNTFVSGNCDVVIGIVNNTVYDPLQPELDSFKEELDKYFKNHTSPDVDLGDISGINASVVNIQKEIDRLNEVAKNLNESLIDLQELGKYEQYIKWPWYIWLGFIAGLIAIVMVTIMLCCMTSCCSCLKGCCSCGSCCKFDEDDSEPVLKGVKLHYT

SEQ ID NO: 275 - protein, 1273 aa, Artificial Sequence
  source: /note="Description of Artificial Sequence: Synthetic polypeptide"
MFVFLVLLPLVSSQCVNLTTRTQLPPAYTNSFTRGVYYPDKVFRSSVLHSTQDLFLPFFSNVTWFHAIHVSGTNGTKRFDNPVLPFNDGVYFASTEKSNIIRGWIFGTTLDSKTQSLLIVNNATNVVIKVCEFQFCNDPFLGVYYHKNNKSWMESEFRVYSSANNCTFEYVSQPFLMDLEGKQGNFKNLREFVFKNIDGYFKIYSKHTPINLVRDLPQGFSALEPLVDLPIGINITRFQTLLALHRSYLTPGDSSSGWTAGAAAYYVGYLQPRTFLLKYNENGTITDAVDCALDPLSETKCTLKSFTVEKGIYQTSNFRVQPTESIVRFPNITNLCPFGEVFNATRFASVYAWNRKRISNCVADYSVLYNSASFSTFKCYGVSPTKLNDLCFTNVYADSFVIRGDEVRQIAPGQTGKIADYNYKLPDDFTGCVIAWNSNNLDSKVGGNYNYLYRLFRKSNLKPFERDISTEIYQAGSTPCNGVEGFNCYFPLQSYGFQPTNGVGYQPYRVVVLSFELLHAPATVCGPKKSTPLVKNKCVNFNFNGLTGTGVLTESNKKFLPFQQFGRDIADTTDAVRDPQTLEILDITPCSFGGVSVITPGTNTSNQVAVLYQDVNCTEVPVAIHADQLTPTWRVYSTGSNVFQTRAGCLIGAEHVNNSYECDIPIGAGICASYQTQTNSPRRARSVASQSIIAYTMSLGAENSVAYSNNSIAIPTNFTISVTTEILPVSMTKTSVDCTMYICGDSTECSNLLLQYGSFCTQLNRALTGIAVEQDKNTQEVFAQVKQIYKTPPIKDFGGFNFSQILPDPSKPSKRSFIEDLLFNKVTLADAGFIKQYGDCLGDIAARDLICAQKFNGLTVLPPLLTDEMIAQYTSALLACTITSGWTCGAGPALQIPFAMQMAYRFNGIGVTQNVLYENQKLIANQFNSAIGKIQDSLSSTASALGKLQDVVNQNAQALNTLVKQLSSNFGAISSVLNDILSRLDKVEAEVQIDRLITGRLQSLQTYVTQQLIRAAEIRASANLAATKMSECVLGQSKRVDFCGKGYHLMSFPQSAPHGVVFLHVTYVPAQEKNFTTAPAICHDGKAHFPREGVFVSNGTHWFVTQRNFYEPQIITTDNTFVSGNCDVVIGIVNNTVYDPLQPELDSFKEELDKYFKNHTSPDVDLGDISGINASVVNIQKEIDRLNEVAKNLNESLIDLQELGKYEQYIKWPWYIWLGFIAGLIAIVMVTIMLCCMTSCCSCLKGCCSCGSCCKFDEDDSEPVLKGVKLHYT

SEQ ID NO: 276 - protein, 1273 aa, Artificial Sequence
  source: /note="Description of Artificial Sequence: Synthetic polypeptide"
MFVFLVLLPLVSSQCVNLTTRTQLPPAYTNSFTRGVYYPDKVFRSSVLHSTQDLFLPFFSNVTWFHAIHVSGTNGTKRFDNPVLPFNDGVYFASTEKSNIIRGWIFGTTLDSKTQSLLIVNNATNVVIKVCEFQFCNDPFLGVYYHKNNKSWMESEFRVYSSANNCTFEYVSQPFLMDLEGKQGNFKNLREFVFKNIDGYFKIYSKHTPINLVRDLPQGFSALEPLVDLPIGINITRFQTLLALHRSYLTPGDSSSGWTAGAAAYYVGYLQPRTFLLKYNENGTITDAVDCALDPLSETKCTLKSFTVEKGIYQTSNFRVQPTESIVRFPNITNLCPFGEVFNATRFASVYAWNRKRISNCVADYSVLYNSASFSTFKCYGVSPTKLNDLCFTNVYADSFVIRGDEVRQIAPGQTGKIADYNYKLPDDFTGCVIAWNSNNLDSKVGGNYNYLYRLFRKSNLKPFERDISTEIYQAGSTPCNGVEGFNCYFPLQSYGFQPTNGVGYQPYRVVVLSFELLHAPATVCGPKKSTPLVKNKCVNFNFNGLTGTGVLTESNKKFLPFQQFGRDIADTTDAVRDPQTLEILDITPCSFGGVSVITPGTNTSNQVAVLYQDVNCTEVPVAIHADQLTPTWRVYSTGSNVFQTRAGCLIGAEHVNNSYECDIPIGAGICASYQTQTNSPRRARSVASQSIIAYTMSLGAENSVAYSNNSIAIPTNFTISVTTEILPVSMTKTSVDCTMYICGDSTECSNLLLQYGSFCTQLNRALTGIAVEQDKNTQEVFAQVKQIYKTPPIKDFGGFNFSQILPDPSKPSKRSFIEDLLFNKVTLADAGFIKQYGDCLGDIAARDLICAQKFNGLTVLPPLLTDEMIAQYTSALLAGTITCGWTFGAGPCLQIPFAMQMAYRFNGIGVTQNVLYENQKLIANQFNSAIGKIQDSLSSTASALGKLQDVVNQNAQALNTLVKQLSSNFGAISSVLNDILSRLDKVEAEVQIDRLITGRLQSLQTYVTQQLIRAAEIRASANLAATKMSECVLGQSKRVDFCGKGYHLMSFPQSAPHGVVFLHVTYVPAQEKNFTTAPAICHDGKAHFPREGVFVSNGTHWFVTQRNFYEPQIITTDNTFVSGNCDVVIGIVNNTVYDPLQPELDSFKEELDKYFKNHTSPDVDLGDISGINASVVNIQKEIDRLNEVAKNLNESLIDLQELGKYEQYIKWPWYIWLGFIAGLIAIVMVTIMLCCMTSCCSCLKGCCSCGSCCKFDEDDSEPVLKGVKLHYT

SEQ ID NO: 277 - protein, 1273 aa, Artificial Sequence
  source: /note="Description of Artificial Sequence: Synthetic polypeptide"
MFVFLVLLPLVSSQCVNLTTRTQLPPAYTNSFTRGVYYPDKVFRSSVLHSTQDLFLPFFSNVTWFHAIHVSGTNGTKRFDNPVLPFNDGVYFASTEKSNIIRGWIFGTTLDSKTQSLLIVNNATNVVIKVCEFQFCNDPFLGVYYHKNNKSWMESEFRVYSSANNCTFEYVSQPFLMDLEGKQGNFKNLREFVFKNIDGYFKIYSKHTPINLVRDLPQGFSALEPLVDLPIGINITRFQTLLALHRSYLTPGDSSSGWTAGAAAYYVGYLQPRTFLLKYNENGTITDAVDCALDPLSETKCTLKSFTVEKGIYQTSNFRVQPTESIVRFPNITNLCPFGEVFNATRFASVYAWNRKRISNCVADYSVLYNSASFSTFKCYGVSPTKLNDLCFTNVYADSFVIRGDEVRQIAPGQTGKIADYNYKLPDDFTGCVIAWNSNNLDSKVGGNYNYLYRLFRKSNLKPFERDISTEIYQAGSTPCNGVEGFNCYFPLQSYGFQPTNGVGYQPYRVVVLSFELLHAPATVCGPKKSTPLVKNKCVNFNFNGLTGTGVLTESNKKFLPFQQFGRDIADITDAVRDPQTLEILDITPCSFGGVSVITPGTNTSNQVAVLYQNVNCTEVPVAIHADQLTPTWRVYSTGSNVFQTRAGCLIGAEHVNNSYECDIPIGAGICASYQTQTNSPRRARSVASQSIIAYTMSLGAENSVAYSNNSIAIPTNFTISVTTEILPVSMTKTSVDCTMYICGDSTECSNLLLQYGSFCTQLNRALTGIAVEQDKNTQEVFAQVKQIYKTPPIKDFGGFNFSQILPDPSKPSKRSFIEDLLFNKVTLADAGFIKQYGDCLGDIAARDLICAQKFNGLTVLPPLLTDEMIAQYTSALLAGTITSGWTFGAGAALQIPFAMQMAYRFNGIGVTQNVLYENQKLIANQFNSAIGKIQDSLSSTASALGKLQDVVNQNAQALNTLVKQLSSNFGAISSVLNDILSRLDKVEAEVQIDRLITGRLQSLQTYVTQQLIRAAEIRASANLAATKMSECVLGQSKRVDFCGKGYHLMSFPQSAPHGVVFLHVTYVPAQEKNFTTAPAICHDGKAHFPREGVFVSNGTHWFVTQRNFYEPQIITTDNTFVSGNCDVVIGIVNNTVYDPLQPELDSFKEELDKYFKNHTSPDVDLGDISGINASVVNIQKEIDRLNEVAKNLNESLIDLQELGKYEQYIKWPWYIWLGFIAGLIAIVMVTIMLCCMTSCCSCLKGCCSCGSCCKFDEDDSEPVLKGVKLHYT

SEQ ID NO: 278 - protein, 1273 aa, Artificial Sequence
  source: /note="Description of Artificial Sequence: Synthetic polypeptide"
MFVFLVLLPLVSSQCVNLTTRTQLPPAYTNSFTRGVYYPDKVFRSSVLHSTQDLFLPFFSNVTWFHAIHVSGTNGTKRFDNPVLPFNDGVYFASTEKSNIIRGWIFGTTLDSKTQSLLIVNNATNVVIKVCEFQFCNDPFLGVYYHKNNKSWMESEFRVYSSANNCTFEYVSQPFLMDLEGKQGNFKNLREFVFKNIDGYFKIYSKHTPINLVRDLPQGFSALEPLVDLPIGINITRFQTLLALHRSYLTPGDSSSGWTAGAAAYYVGYLQPRTFLLKYNENGTITDAVDCALDPLSETKCTLKSFTVEKGIYQTSNFRVQPTESIVRFPNITNLCPFGEVFNATRFASVYAWNRKRISNCVADYSVLYNSASFSTFKCYGVSPTKLNDLCFTNVYADSFVIRGDEVRQIAPGQTGKIADYNYKLPDDFTGCVIAWNSNNLDSKVGGNYNYLYRLFRKSNLKPFERDISTEIYQAGSTPCNGVEGFNCYFPLQSYGFQPTNGVGYQPYRVVVLSFELLHAPATVCGPKKSTNLVKNKCVNFNFNGLTGTGVLTESNKKFLPFQQFGRDIADITDAVRDPQTLEILDITPCSFGGVSVITPGTNTSNQVAVLYQNVNCTEVPVAIHADQLTPTWRVYSTGSNVFQTRAGCLIGAEHVNNSYECDIPIGAGICASYQTQTNSPRRARSVASQSIIAYTMSLGAENSVAYSNNSIAIPTNFTISVTTEILPVSMTKTSVDCTMYICGDSTECSNLLLQYGSFCTQLNRALTGIAVEQDKNTQEVFAQVKQIYKTPPIKDFGGFNFSQILPDPSKPSKRSFIEDLLFNKVTLADAGFIKQYGDCLGDIAARDLICAQKFNGLTVLPPLLTDEMIAQYTSALLACTITSGWTCGAGAALQIPFAMQMAYRFNGIGVTQNVLYENQKLIANQFNSAIGKIQDSLSSTASALGKLQDVVNQNAQALNTLVKQLSSNFGAISSVLNDILSRLDKVEAEVQIDRLITGRLQSLQTYVTQQLIRAAEIRASANLAATKMSECVLGQSKRVDFCGKGYHLMSFPQSAPHGVVFLHVTYVPAQEKNFTTAPAICHDGKAHFPREGVFVSNGTHWFVTQRNFYEPQIITTDNTFVSGNCDVVIGIVNNTVYDPLQPELDSFKEELDKYFKNHTSPDVDLGDISGINASVVNIQKEIDRLNEVAKNLNESLIDLQELGKYEQYIKWPWYIWLGFIAGLIAIVMVTIMLCCMTSCCSCLKGCCSCGSCCKFDEDDSEPVLKGVKLHYT

SEQ ID NO: 279 - protein, 1273 aa, Artificial Sequence
  source: /note="Description of Artificial Sequence: Synthetic polypeptide"
MFVFLVLLPLVSSQCVNLTTRTQLPPAYTNSFTRGVYYPDKVFRSSVLHSTQDLFLPFFSNVTWFHAIHVSGTNGTKRFDNPVLPFNDGVYFASTEKSNIIRGWIFGTTLDSKTQSLLIVNNATNVVIKVCEFQFCNDPFLGVYYHKNNKSWMESEFRVYSSANNCTFEYVSQPFLMDLEGKQGNFKNLREFVFKNIDGYFKIYSKHTPINLVRDLPQGFSALEPLVDLPIGINITRFQTLLALHRSYLTPGDSSSGWTAGAAAYYVGYLQPRTFLLKYNENGTITDAVDCALDPLSETKCTLKSFTVEKGIYQTSNFRVQPTESIVRFPNITNLCPFGEVFNATRFASVYAWNRKRISNCVADYSVLYNSASFSTFKCYGVSPTKLNDLCFTNVYADSFVIRGDEVRQIAPGQTGKIADYNYKLPDDFTGCVIAWNSNNLDSKVGGNYNYLYRLFRKSNLKPFERDISTEIYQAGSTPCNGVEGFNCYFPLQSYGFQPTNGVGYQPYRVVVLSFELLHAPATVCGPKKSTNLVKNKCVNFNFNGLTGTGVLTESNKKFLPFQQFGRDIADITDAVRDPQTLEILDITPCSFGGVSVITPGTNTSNQVAVLYQNVNCTEVPVAIHADQLTPTWRVYSTGSNVFQTRAGCLIGAEHVNNSYECDIPIGAGICASYQTQTNSPRRARSVASQSIIAYTMSLGAENSVAYSNNSIAIPTNFTISVTTEILPVSMTKTSVDCTMYICGDSTECSNLLLQYGSFCTQLNRALTGIAVEQDKNTQEVFAQVKQIYKTPPIKDFGGFNFSQILPDPSKPSKRSFIEDLLFNKVTLADAGFIKQYGDCLGDIAARDLICAQKFNGLTVLPPLLTDEMIAQYTSALLAGTITCGWTFGAGACLQIPFAMQMAYRFNGIGVTQNVLYENQKLIANQFNSAIGKIQDSLSSTASALGKLQDVVNQNAQALNTLVKQLSSNFGAISSVLNDILSRLDKVEAEVQIDRLITGRLQSLQTYVTQQLIRAAEIRASANLAATKMSECVLGQSKRVDFCGKGYHLMSFPQSAPHGVVFLHVTYVPAQEKNFTTAPAICHDGKAHFPREGVFVSNGTHWFVTQRNFYEPQIITTDNTFVSGNCDVVIGIVNNTVYDPLQPELDSFKEELDKYFKNHTSPDVDLGDISGINASVVNIQKEIDRLNEVAKNLNESLIDLQELGKYEQYIKWPWYIWLGFIAGLIAIVMVTIMLCCMTSCCSCLKGCCSCGSCCKFDEDDSEPVLKGVKLHYT

SEQ ID NO: 280 - protein, 1273 aa, Artificial Sequence
  source: /note="Description of Artificial Sequence: Synthetic polypeptide"
MFVFLVLLPLVSSQCVNLTTRTQLPPAYTNSFTRGVYYPDKVFRSSVLHSTQDLFLPFFSNVTWFHAIHVSGTNGTKRFDNPVLPFNDGVYFASTEKSNIIRGWIFGTTLDSKTQSLLIVNNATNVVIKVCEFQFCNDPFLGVYYHKNNKSWMESEFRVYSSANNCTFEYVSQPFLMDLEGKQGNFKNLREFVFKNIDGYFKIYSKHTPINLVRDLPQGFSALEPLVDLPIGINITRFQTLLALHRSYLTPGDSSSGWTAGAAAYYVGYLQPRTFLLKYNENGTITDAVDCALDPLSETKCTLKSFTVEKGIYQTSNFRVQPTESIVRFPNITNLCPFGEVFNATRFASVYAWNRKRISNCVADYSVLYNSASFSTFKCYGVSPTKLNDLCFTNVYADSFVIRGDEVRQIAPGQTGKIADYNYKLPDDFTGCVIAWNSNNLDSKVGGNYNYLYRLFRKSNLKPFERDISTEIYQAGSTPCNGVEGFNCYFPLQSYGFQPTNGVGYQPYRVVVLSFELLHAPATVCGPKKSTPLVKNKCVNFNFNGLTGTGVLTESNKKFLPFQQFGRDIADTTDAVRDPQTLEILDITPCSFGGVSVITPGTNTSNQVAVLYQNVNCTEVPVAIHADQLTPTWRVYSTGSNVFQTRAGCLIGAEHVNNSYECDIPIGAGICASYQTQTNSPRRARSVASQSIIAYTMSLGAENSVAYSNNSIAIPTNFTISVTTEILPVSMTKTSVDCTMYICGDSTECSNLLLQYGSFCTQLNRALTGIAVEQDKNTQEVFAQVKQIYKTPPIKDFGGFNFSQILPDPSKPSKRSFIEDLLFNKVTLADAGFIKQYGDCLGDIAARDLICAQKFNGLTVLPPLLTDEMIAQYTSALLACTITSGWTCGAGAALQIPFAMQMAYRFNGIGVTQNVLYENQKLIANQFNSAIGKIQDSLSSTASALGKLQDVVNQNAQALNTLVKQLSSNFGAISSVLNDILSRLDKVEAEVQIDRLITGRLQSLQTYVTQQLIRAAEIRASANLAATKMSECVLGQSKRVDFCGKGYHLMSFPQSAPHGVVFLHVTYVPAQEKNFTTAPAICHDGKAHFPREGVFVSNGTHWFVTQRNFYEPQIITTDNTFVSGNCDVVIGIVNNTVYDPLQPELDSFKEELDKYFKNHTSPDVDLGDISGINASVVNIQKEIDRLNEVAKNLNESLIDLQELGKYEQYIKWPWYIWLGFIAGLIAIVMVTIMLCCMTSCCSCLKGCCSCGSCCKFDEDDSEPVLKGVKLHYT

SEQ ID NO: 281 - protein, 1273 aa, Artificial Sequence
  source: /note="Description of Artificial Sequence: Synthetic polypeptide"
MFVFLVLLPLVSSQCVNLTTRTQLPPAYTNSFTRGVYYPDKVFRSSVLHSTQDLFLPFFSNVTWFHAIHVSGTNGTKRFDNPVLPFNDGVYFASTEKSNIIRGWIFGTTLDSKTQSLLIVNNATNVVIKVCEFQFCNDPFLGVYYHKNNKSWMESEFRVYSSANNCTFEYVSQPFLMDLEGKQGNFKNLREFVFKNIDGYFKIYSKHTPINLVRDLPQGFSALEPLVDLPIGINITRFQTLLALHRSYLTPGDSSSGWTAGAAAYYVGYLQPRTFLLKYNENGTITDAVDCALDPLSETKCTLKSFTVEKGIYQTSNFRVQPTESIVRFPNITNLCPFGEVFNATRFASVYAWNRKRISNCVADYSVLYNSASFSTFKCYGVSPTKLNDLCFTNVYADSFVIRGDEVRQIAPGQTGKIADYNYKLPDDFTGCVIAWNSNNLDSKVGGNYNYLYRLFRKSNLKPFERDISTEIYQAGSTPCNGVEGFNCYFPLQSYGFQPTNGVGYQPYRVVVLSFELLHAPATVCGPKKSTPLVKNKCVNFNFNGLTGTGVLTESNKKFLPFQQFGRDIADTTDAVRDPQTLEILDITPCSFGGVSVITPGTNTSNQVAVLYQNVNCTEVPVAIHADQLTPTWRVYSTGSNVFQTRAGCLIGAEHVNNSYECDIPIGAGICASYQTQTNSPRRARSVASQSIIAYTMSLGAENSVAYSNNSIAIPTNFTISVTTEILPVSMTKTSVDCTMYICGDSTECSNLLLQYGSFCTQLNRALTGIAVEQDKNTQEVFAQVKQIYKTPPIKDFGGFNFSQILPDPSKPSKRSFIEDLLFNKVTLADAGFIKQYGDCLGDIAARDLICAQKFNGLTVLPPLLTDEMIAQYTSALLAGTITCGWTFGAGACLQIPFAMQMAYRFNGIGVTQNVLYENQKLIANQFNSAIGKIQDSLSSTASALGKLQDVVNQNAQALNTLVKQLSSNFGAISSVLNDILSRLDKVEAEVQIDRLITGRLQSLQTYVTQQLIRAAEIRASANLAATKMSECVLGQSKRVDFCGKGYHLMSFPQSAPHGVVFLHVTYVPAQEKNFTTAPAICHDGKAHFPREGVFVSNGTHWFVTQRNFYEPQIITTDNTFVSGNCDVVIGIVNNTVYDPLQPELDSFKEELDKYFKNHTSPDVDLGDISGINASVVNIQKEIDRLNEVAKNLNESLIDLQELGKYEQYIKWPWYIWLGFIAGLIAIVMVTIMLCCMTSCCSCLKGCCSCGSCCKFDEDDSEPVLKGVKLHYT

SEQ ID NO: 282 - protein, 1273 aa, Artificial Sequence
  source: /note="Description of Artificial Sequence: Synthetic polypeptide"
MFVFLVLLPLVSSQCVNLTTRTQLPPAYTNSFTRGVYYPDKVFRSSVLHSTQDLFLPFFSNVTWFHAIHVSGTNGTKRFDNPVLPFNDGVYFASTEKSNIIRGWIFGTTLDSKTQSLLIVNNATNVVIKVCEFQFCNDPFLGVYYHKNNKSWMESEFRVYSSANNCTFEYVSQPFLMDLEGKQGNFKNLREFVFKNIDGYFKIYSKHTPINLVRDLPQGFSALEPLVDLPIGINITRFQTLLALHRSYLTPGDSSSGWTAGAAAYYVGYLQPRTFLLKYNENGTITDAVDCALDPLSETKCTLKSFTVEKGIYQTSNFRVQPTESIVRFPNITNLCPFGEVFNATRFASVYAWNRKRISNCVADYSVLYNSASFSTFKCYGVSPTKLNDLCFTNVYADSFVIRGDEVRQIAPGQTGKIADYNYKLPDDFTGCVIAWNSNNLDSKVGGNYNYLYRLFRKSNLKPFERDISTEIYQAGSTPCNGVEGFNCYFPLQSYGFQPTNGVGYQPYRVVVLSFELLHAPATVCGPKKSTPLVKNKCVNFNFNGLTGTGVLTESNKKFLPFQQFGRDIADITDAVRDPQTLEILDITPCSFGGVSVITPGTNTSNQVAVLYQDVNCTEVPVAIHADQLTPTWRVYSTGSNVFQTRAGCLIGAEHVNNSYECDIPIGAGICASYQTQTNSPRRARSVASQSIIAYTMSLGAENSVAYSNNSIAIPTNFTISVTTEILPVSMTKTSVDCTMYICGDSTECSNLLLQYGSFCTQLNRALTGIAVEQDKNTQEVFAQVKQIYKTPPIKDFGGFNFSQILPDPSKPSKRSFIEDLLFNKVTLADAGFIKQYGDCLGDIAARDLICAQKFNGLTVLPPLLTDEMIAQYTSALLACTITSGWTCGAGAALQIPFAMQMAYRFNGIGVTQNVLYENQKLIANQFNSAIGKIQDSLSSTASALGKLQDVVNQNAQALNTLVKQLSSNFGAISSVLNDILSRLDKVEAEVQIDRLITGRLQSLQTYVTQQLIRAAEIRASANLAATKMSECVLGQSKRVDFCGKGYHLMSFPQSAPHGVVFLHVTYVPAQEKNFTTAPAICHDGKAHFPREGVFVSNGTHWFVTQRNFYEPQIITTDNTFVSGNCDVVIGIVNNTVYDPLQPELDSFKEELDKYFKNHTSPDVDLGDISGINASVVNIQKEIDRLNEVAKNLNESLIDLQELGKYEQYIKWPWYIWLGFIAGLIAIVMVTIMLCCMTSCCSCLKGCCSCGSCCKFDEDDSEPVLKGVKLHYT

SEQ ID NO: 283 - protein, 1273 aa, Artificial Sequence
  source: /note="Description of Artificial Sequence: Synthetic polypeptide"
MFVFLVLLPLVSSQCVNLTTRTQLPPAYTNSFTRGVYYPDKVFRSSVLHSTQDLFLPFFSNVTWFHAIHVSGTNGTKRFDNPVLPFNDGVYFASTEKSNIIRGWIFGTTLDSKTQSLLIVNNATNVVIKVCEFQFCNDPFLGVYYHKNNKSWMESEFRVYSSANNCTFEYVSQPFLMDLEGKQGNFKNLREFVFKNIDGYFKIYSKHTPINLVRDLPQGFSALEPLVDLPIGINITRFQTLLALHRSYLTPGDSSSGWTAGAAAYYVGYLQPRTFLLKYNENGTITDAVDCALDPLSETKCTLKSFTVEKGIYQTSNFRVQPTESIVRFPNITNLCPFGEVFNATRFASVYAWNRKRISNCVADYSVLYNSASFSTFKCYGVSPTKLNDLCFTNVYADSFVIRGDEVRQIAPGQTGKIADYNYKLPDDFTGCVIAWNSNNLDSKVGGNYNYLYRLFRKSNLKPFERDISTEIYQAGSTPCNGVEGFNCYFPLQSYGFQPTNGVGYQPYRVVVLSFELLHAPATVCGPKKSTPLVKNKCVNFNFNGLTGTGVLTESNKKFLPFQQFGRDIADITDAVRDPQTLEILDITPCSFGGVSVITPGTNTSNQVAVLYQDVNCTEVPVAIHADQLTPTWRVYSTGSNVFQTRAGCLIGAEHVNNSYECDIPIGAGICASYQTQTNSPRRARSVASQSIIAYTMSLGAENSVAYSNNSIAIPTNFTISVTTEILPVSMTKTSVDCTMYICGDSTECSNLLLQYGSFCTQLNRALTGIAVEQDKNTQEVFAQVKQIYKTPPIKDFGGFNFSQILPDPSKPSKRSFIEDLLFNKVTLADAGFIKQYGDCLGDIAARDLICAQKFNGLTVLPPLLTDEMIAQYTSALLAGTITCGWTFGAGACLQIPFAMQMAYRFNGIGVTQNVLYENQKLIANQFNSAIGKIQDSLSSTASALGKLQDVVNQNAQALNTLVKQLSSNFGAISSVLNDILSRLDKVEAEVQIDRLITGRLQSLQTYVTQQLIRAAEIRASANLAATKMSECVLGQSKRVDFCGKGYHLMSFPQSAPHGVVFLHVTYVPAQEKNFTTAPAICHDGKAHFPREGVFVSNGTHWFVTQRNFYEPQIITTDNTFVSGNCDVVIGIVNNTVYDPLQPELDSFKEELDKYFKNHTSPDVDLGDISGINASVVNIQKEIDRLNEVAKNLNESLIDLQELGKYEQYIKWPWYIWLGFIAGLIAIVMVTIMLCCMTSCCSCLKGCCSCGSCCKFDEDDSEPVLKGVKLHYT

SEQ ID NO: 284 - protein, 1273 aa, Artificial Sequence
  source: /note="Description of Artificial Sequence: Synthetic polypeptide"
MFVFLVLLPLVSSQCVNLTTRTQLPPAYTNSFTRGVYYPDKVFRSSVLHSTQDLFLPFFSNVTWFHAIHVSGTNGTKRFDNPVLPFNDGVYFASTEKSNIIRGWIFGTTLDSKTQSLLIVNNATNVVIKVCEFQFCNDPFLGVYYHKNNKSWMESEFRVYSSANNCTFEYVSQPFLMDLEGKQGNFKNLREFVFKNIDGYFKIYSKHTPINLVRDLPQGFSALEPLVDLPIGINITRFQTLLALHRSYLTPGDSSSGWTAGAAAYYVGYLQPRTFLLKYNENGTITDAVDCALDPLSETKCTLKSFTVEKGIYQTSNFRVQPTESIVRFPNITNLCPFGEVFNATRFASVYAWNRKRISNCVADYSVLYNSASFSTFKCYGVSPTKLNDLCFTNVYADSFVIRGDEVRQIAPGQTGKIADYNYKLPDDFTGCVIAWNSNNLDSKVGGNYNYLYRLFRKSNLKPFERDISTEIYQAGSTPCNGVEGFNCYFPLQSYGFQPTNGVGYQPYRVVVLSFELLHAPATVCGPKKSTNLVKNKCVNFNFNGLTGTGVLTESNKKFLPFQQFGRDIADITDAVRDPQTLEILDITPCSFGGVSVITPGTNTSNQVAVLYQNVNCTEVPVAIHADQLTPTWRVYSTGSNVFQTRAGCLIGAEHVNNSYECDIPIGAGICASYQTQTNSPRRARSVASQSIIAYTMSLGAENSVAYSNNSIAIPTNFTISVTTEILPVSMTKTSVDCTMYICGDSTECSNLLLQYGSFCTQLNRALTGIAVEQDKNTQEVFAQVKQIYKTPPIKDFGGFNFSQILPDPSKPSKRSFIEDLLFNKVTLADAGFIKQYGDCLGDIAARDLICAQKFNGLTVLPPLLTDEMIAQYTSALLAGTITSGWTFGAGPALQIPFAMQMAYRFNGIGVTQNVLYENQKLIANQFNSAIGKIQDSLSSTPSALGKLQDVVNQNAQALNTLVKQLSSNFGAISSVLNDILSRLDKVEAEVQIDRLITGRLQSLQTYVTQQLIRAAEIRASANLAATKMSECVLGQSKRVDFCGKGYHLMSFPQSAPHGVVFLHVTYVPAQEKNFTTAPAICHDGKAHFPREGVFVSNGTHWFVTQRNFYEPQIITTDNTFVSGNCDVVIGIVNNTVYDPLQPELDSFKEELDKYFKNHTSPDVDLGDISGINASVVNIQKEIDRLNEVAKNLNESLIDLQELGKYEQYIKWPWYIWLGFIAGLIAIVMVTIMLCCMTSCCSCLKGCCSCGSCCKFDEDDSEPVLKGVKLHYT

SEQ ID NO: 285 - protein, 1273 aa, Artificial Sequence
  source: /note="Description of Artificial Sequence: Synthetic polypeptide"
MFVFLVLLPLVSSQCVNLTTRTQLPPAYTNSFTRGVYYPDKVFRSSVLHSTQDLFLPFFSNVTWFHAIHVSGTNGTKRFDNPVLPFNDGVYFASTEKSNIIRGWIFGTTLDSKTQSLLIVNNATNVVIKVCEFQFCNDPFLGVYYHKNNKSWMESEFRVYSSANNCTFEYVSQPFLMDLEGKQGNFKNLREFVFKNIDGYFKIYSKHTPINLVRDLPQGFSALEPLVDLPIGINITRFQTLLALHRSYLTPGDSSSGWTAGAAAYYVGYLQPRTFLLKYNENGTITDAVDCALDPLSETKCTLKSFTVEKGIYQTSNFRVQPTESIVRFPNITNLCPFGEVFNATRFASVYAWNRKRISNCVADYSVLYNSASFSTFKCYGVSPTKLNDLCFTNVYADSFVIRGDEVRQIAPGQTGKIADYNYKLPDDFTGCVIAWNSNNLDSKVGGNYNYLYRLFRKSNLKPFERDISTEIYQAGSTPCNGVEGFNCYFPLQSYGFQPTNGVGYQPYRVVVLSFELLHAPATVCGPKKSTPLVKNKCVNFNFNGLTGTGVLTESNKKFLPFQQFGRDIADTTDAVRDPQTLEILDITPCSFGGVSVITPGTNTSNQVAVLYQNVNCTEVPVAIHADQLTPTWRVYSTGSNVFQTRAGCLIGAEHVNNSYECDIPIGAGICASYQTQTNSPRRARSVASQSIIAYTMSLGAENSVAYSNNSIAIPTNFTISVTTEILPVSMTKTSVDCTMYICGDSTECSNLLLQYGSFCTQLNRALTGIAVEQDKNTQEVFAQVKQIYKTPPIKDFGGFNFSQILPDPSKPSKRSFIEDLLFNKVTLADAGFIKQYGDCLGDIAARDLICAQKFNGLTVLPPLLTDEMIAQYTSALLAGTITSGWTFGAGPALQIPFAMQMAYRFNGIGVTQNVLYENQKLIANQFNSAIGKIQDSLSSTPSALGKLQDVVNQNAQALNTLVKQLSSNFGAISSVLNDILSRLDKVEAEVQIDRLITGRLQSLQTYVTQQLIRAAEIRASANLAATKMSECVLGQSKRVDFCGKGYHLMSFPQSAPHGVVFLHVTYVPAQEKNFTTAPAICHDGKAHFPREGVFVSNGTHWFVTQRNFYEPQIITTDNTFVSGNCDVVIGIVNNTVYDPLQPELDSFKEELDKYFKNHTSPDVDLGDISGINASVVNIQKEIDRLNEVAKNLNESLIDLQELGKYEQYIKWPWYIWLGFIAGLIAIVMVTIMLCCMTSCCSCLKGCCSCGSCCKFDEDDSEPVLKGVKLHYT

SEQ ID NO: 286 - protein, 1273 aa, Artificial Sequence
  source: /note="Description of Artificial Sequence: Synthetic polypeptide"
MFVFLVLLPLVSSQCVNLTTRTQLPPAYTNSFTRGVYYPDKVFRSSVLHSTQDLFLPFFSNVTWFHAIHVSGTNGTKRFDNPVLPFNDGVYFASTEKSNIIRGWIFGTTLDSKTQSLLIVNNATNVVIKVCEFQFCNDPFLGVYYHKNNKSWMESEFRVYSSANNCTFEYVSQPFLMDLEGKQGNFKNLREFVFKNIDGYFKIYSKHTPINLVRDLPQGFSALEPLVDLPIGINITRFQTLLALHRSYLTPGDSSSGWTAGAAAYYVGYLQPRTFLLKYNENGTITDAVDCALDPLSETKCTLKSFTVEKGIYQTSNFRVQPTESIVRFPNITNLCPFGEVFNATRFASVYAWNRKRISNCVADYSVLYNSASFSTFKCYGVSPTKLNDLCFTNVYADSFVIRGDEVRQIAPGQTGKIADYNYKLPDDFTGCVIAWNSNNLDSKVGGNYNYLYRLFRKSNLKPFERDISTEIYQAGSTPCNGVEGFNCYFPLQSYGFQPTNGVGYQPYRVVVLSFELLHAPATVCGPKKSTNLVKNKCVNFNFNGLTGTGVLTESNKKFLPFQQFGRDIADTTDAVRDPQTLEILDITPCSFGGVSVITPGTNTSNQVAVLYQNVNCTEVPVAIHADQLTPTWRVYSTGSNVFQTRAGCLIGAEHVNNSYECDIPIGAGICASYQTQTNSPRRARSVASQSIIAYTMSLGAENSVAYSNNSIAIPTNFTISVTTEILPVSMTKTSVDCTMYICGDSTECSNLLLQYGSFCTQLNRALTGIAVEQDKNTQEVFAQVKQIYKTPPIKDFGGFNFSQILPDPSKPSKRSFIEDLLFNKVTLADAGFIKQYGDCLGDIAARDLICAQKFNGLTVLPPLLTDEMIAQYTSALLACTITSGWTCGAGPALQIPFAMQMAYRFNGIGVTQNVLYENQKLIANQFNSAIGKIQDSLSSTPSALGKLQDVVNQNAQALNTLVKQLSSNFGAISSVLNDILSRLDKVEAEVQIDRLITGRLQSLQTYVTQQLIRAAEIRASANLAATKMSECVLGQSKRVDFCGKGYHLMSFPQSAPHGVVFLHVTYVPAQEKNFTTAPAICHDGKAHFPREGVFVSNGTHWFVTQRNFYEPQIITTDNTFVSGNCDVVIGIVNNTVYDPLQPELDSFKEELDKYFKNHTSPDVDLGDISGINASVVNIQKEIDRLNEVAKNLNESLIDLQELGKYEQYIKWPWYIWLGFIAGLIAIVMVTIMLCCMTSCCSCLKGCCSCGSCCKFDEDDSEPVLKGVKLHYT

SEQ ID NO: 287 - protein, 1273 aa, Artificial Sequence
  source: /note="Description of Artificial Sequence: Synthetic polypeptide"
MFVFLVLLPLVSSQCVNLTTRTQLPPAYTNSFTRGVYYPDKVFRSSVLHSTQDLFLPFFSNVTWFHAIHVSGTNGTKRFDNPVLPFNDGVYFASTEKSNIIRGWIFGTTLDSKTQSLLIVNNATNVVIKVCEFQFCNDPFLGVYYHKNNKSWMESEFRVYSSANNCTFEYVSQPFLMDLEGKQGNFKNLREFVFKNIDGYFKIYSKHTPINLVRDLPQGFSALEPLVDLPIGINITRFQTLLALHRSYLTPGDSSSGWTAGAAAYYVGYLQPRTFLLKYNENGTITDAVDCALDPLSETKCTLKSFTVEKGIYQTSNFRVQPTESIVRFPNITNLCPFGEVFNATRFASVYAWNRKRISNCVADYSVLYNSASFSTFKCYGVSPTKLNDLCFTNVYADSFVIRGDEVRQIAPGQTGKIADYNYKLPDDFTGCVIAWNSNNLDSKVGGNYNYLYRLFRKSNLKPFERDISTEIYQAGSTPCNGVEGFNCYFPLQSYGFQPTNGVGYQPYRVVVLSFELLHAPATVCGPKKSTNLVKNKCVNFNFNGLTGTGVLTESNKKFLPFQQFGRDIADTTDAVRDPQTLEILDITPCSFGGVSVITPGTNTSNQVAVLYQNVNCTEVPVAIHADQLTPTWRVYSTGSNVFQTRAGCLIGAEHVNNSYECDIPIGAGICASYQTQTNSPRRARSVASQSIIAYTMSLGAENSVAYSNNSIAIPTNFTISVTTEILPVSMTKTSVDCTMYICGDSTECSNLLLQYGSFCTQLNRALTGIAVEQDKNTQEVFAQVKQIYKTPPIKDFGGFNFSQILPDPSKPSKRSFIEDLLFNKVTLADAGFIKQYGDCLGDIAARDLICAQKFNGLTVLPPLLTDEMIAQYTSALLAGTITCGWTFGAGPCLQIPFAMQMAYRFNGIGVTQNVLYENQKLIANQFNSAIGKIQDSLSSTPSALGKLQDVVNQNAQALNTLVKQLSSNFGAISSVLNDILSRLDKVEAEVQIDRLITGRLQSLQTYVTQQLIRAAEIRASANLAATKMSECVLGQSKRVDFCGKGYHLMSFPQSAPHGVVFLHVTYVPAQEKNFTTAPAICHDGKAHFPREGVFVSNGTHWFVTQRNFYEPQIITTDNTFVSGNCDVVIGIVNNTVYDPLQPELDSFKEELDKYFKNHTSPDVDLGDISGINASVVNIQKEIDRLNEVAKNLNESLIDLQELGKYEQYIKWPWYIWLGFIAGLIAIVMVTIMLCCMTSCCSCLKGCCSCGSCCKFDEDDSEPVLKGVKLHYT

SEQ ID NO: 288 - protein, 1273 aa, Artificial Sequence
  source: /note="Description of Artificial Sequence: Synthetic polypeptide"
MFVFLVLLPLVSSQCVNLTTRTQLPPAYTNSFTRGVYYPDKVFRSSVLHSTQDLFLPFFSNVTWFHAIHVSGTNGTKRFDNPVLPFNDGVYFASTEKSNIIRGWIFGTTLDSKTQSLLIVNNATNVVIKVCEFQFCNDPFLGVYYHKNNKSWMESEFRVYSSANNCTFEYVSQPFLMDLEGKQGNFKNLREFVFKNIDGYFKIYSKHTPINLVRDLPQGFSALEPLVDLPIGINITRFQTLLALHRSYLTPGDSSSGWTAGAAAYYVGYLQPRTFLLKYNENGTITDAVDCALDPLSETKCTLKSFTVEKGIYQTSNFRVQPTESIVRFPNITNLCPFGEVFNATRFASVYAWNRKRISNCVADYSVLYNSASFSTFKCYGVSPTKLNDLCFTNVYADSFVIRGDEVRQIAPGQTGKIADYNYKLPDDFTGCVIAWNSNNLDSKVGGNYNYLYRLFRKSNLKPFERDISTEIYQAGSTPCNGVEGFNCYFPLQSYGFQPTNGVGYQPYRVVVLSFELLHAPATVCGPKKSTPLVKNKCVNFNFNGLTGTGVLTESNKKFLPFQQFGRDIADITDAVRDPQTLEILDITPCSFGGVSVITPGTNTSNQVAVLYQDVNCTEVPVAIHADQLTPTWRVYSTGSNVFQTRAGCLIGAEHVNNSYECDIPIGAGICASYQTQTNSPRRARSVASQSIIAYTMSLGAENSVAYSNNSIAIPTNFTISVTTEILPVSMTKTSVDCTMYICGDSTECSNLLLQYGSFCTQLNRALTGIAVEQDKNTQEVFAQVKQIYKTPPIKDFGGFNFSQILPDPSKPSKRSFIEDLLFNKVTLADAGFIKQYGDCLGDIAARDLICAQKFNGLTVLPPLLTDEMIAQYTSALLAGTITSGWTFGAGPALQIPFAMQMAYRFNGIGVTQNVLYENQKLIANQFNSAIGKIQDSLSSTPSALGKLQDVVNQNAQALNTLVKQLSSNFGAISSVLNDILSRLDKVEAEVQIDRLITGRLQSLQTYVTQQLIRAAEIRASANLAATKMSECVLGQSKRVDFCGKGYHLMSFPQSAPHGVVFLHVTYVPAQEKNFTTAPAICHDGKAHFPREGVFVSNGTHWFVTQRNFYEPQIITTDNTFVSGNCDVVIGIVNNTVYDPLQPELDSFKEELDKYFKNHTSPDVDLGDISGINASVVNIQKEIDRLNEVAKNLNESLIDLQELGKYEQYIKWPWYIWLGFIAGLIAIVMVTIMLCCMTSCCSCLKGCCSCGSCCKFDEDDSEPVLKGVKLHYT

SEQ ID NO: 289 - protein, 1273 aa, Artificial Sequence
  source: /note="Description of Artificial Sequence: Synthetic polypeptide"
MFVFLVLLPLVSSQCVNLTTRTQLPPAYTNSFTRGVYYPDKVFRSSVLHSTQDLFLPFFSNVTWFHAIHVSGTNGTKRFDNPVLPFNDGVYFASTEKSNIIRGWIFGTTLDSKTQSLLIVNNATNVVIKVCEFQFCNDPFLGVYYHKNNKSWMESEFRVYSSANNCTFEYVSQPFLMDLEGKQGNFKNLREFVFKNIDGYFKIYSKHTPINLVRDLPQGFSALEPLVDLPIGINITRFQTLLALHRSYLTPGDSSSGWTAGAAAYYVGYLQPRTFLLKYNENGTITDAVDCALDPLSETKCTLKSFTVEKGIYQTSNFRVQPTESIVRFPNITNLCPFGEVFNATRFASVYAWNRKRISNCVADYSVLYNSASFSTFKCYGVSPTKLNDLCFTNVYADSFVIRGDEVRQIAPGQTGKIADYNYKLPDDFTGCVIAWNSNNLDSKVGGNYNYLYRLFRKSNLKPFERDISTEIYQAGSTPCNGVEGFNCYFPLQSYGFQPTNGVGYQPYRVVVLSFELLHAPATVCGPKKSTNLVKNKCVNFNFNGLTGTGVLTESNKKFLPFQQFGRDIADITDAVRDPQTLEILDITPCSFGGVSVITPGTNTSNQVAVLYQDVNCTEVPVAIHADQLTPTWRVYSTGSNVFQTRAGCLIGAEHVNNSYECDIPIGAGICASYQTQTNSPRRARSVASQSIIAYTMSLGAENSVAYSNNSIAIPTNFTISVTTEILPVSMTKTSVDCTMYICGDSTECSNLLLQYGSFCTQLNRALTGIAVEQDKNTQEVFAQVKQIYKTPPIKDFGGFNFSQILPDPSKPSKRSFIEDLLFNKVTLADAGFIKQYGDCLGDIAARDLICAQKFNGLTVLPPLLTDEMIAQYTSALLACTITSGWTCGAGPALQIPFAMQMAYRFNGIGVTQNVLYENQKLIANQFNSAIGKIQDSLSSTPSALGKLQDVVNQNAQALNTLVKQLSSNFGAISSVLNDILSRLDKVEAEVQIDRLITGRLQSLQTYVTQQLIRAAEIRASANLAATKMSECVLGQSKRVDFCGKGYHLMSFPQSAPHGVVFLHVTYVPAQEKNFTTAPAICHDGKAHFPREGVFVSNGTHWFVTQRNFYEPQIITTDNTFVSGNCDVVIGIVNNTVYDPLQPELDSFKEELDKYFKNHTSPDVDLGDISGINASVVNIQKEIDRLNEVAKNLNESLIDLQELGKYEQYIKWPWYIWLGFIAGLIAIVMVTIMLCCMTSCCSCLKGCCSCGSCCKFDEDDSEPVLKGVKLHYT

SEQ ID NO: 290 - protein, 1273 aa, Artificial Sequence
  source: /note="Description of Artificial Sequence: Synthetic polypeptide"
MFVFLVLLPLVSSQCVNLTTRTQLPPAYTNSFTRGVYYPDKVFRSSVLHSTQDLFLPFFSNVTWFHAIHVSGTNGTKRFDNPVLPFNDGVYFASTEKSNIIRGWIFGTTLDSKTQSLLIVNNATNVVIKVCEFQFCNDPFLGVYYHKNNKSWMESEFRVYSSANNCTFEYVSQPFLMDLEGKQGNFKNLREFVFKNIDGYFKIYSKHTPINLVRDLPQGFSALEPLVDLPIGINITRFQTLLALHRSYLTPGDSSSGWTAGAAAYYVGYLQPRTFLLKYNENGTITDAVDCALDPLSETKCTLKSFTVEKGIYQTSNFRVQPTESIVRFPNITNLCPFGEVFNATRFASVYAWNRKRISNCVADYSVLYNSASFSTFKCYGVSPTKLNDLCFTNVYADSFVIRGDEVRQIAPGQTGKIADYNYKLPDDFTGCVIAWNSNNLDSKVGGNYNYLYRLFRKSNLKPFERDISTEIYQAGSTPCNGVEGFNCYFPLQSYGFQPTNGVGYQPYRVVVLSFELLHAPATVCGPKKSTNLVKNKCVNFNFNGLTGTGVLTESNKKFLPFQQFGRDIADITDAVRDPQTLEILDITPCSFGGVSVITPGTNTSNQVAVLYQDVNCTEVPVAIHADQLTPTWRVYSTGSNVFQTRAGCLIGAEHVNNSYECDIPIGAGICASYQTQTNSPRRARSVASQSIIAYTMSLGAENSVAYSNNSIAIPTNFTISVTTEILPVSMTKTSVDCTMYICGDSTECSNLLLQYGSFCTQLNRALTGIAVEQDKNTQEVFAQVKQIYKTPPIKDFGGFNFSQILPDPSKPSKRSFIEDLLFNKVTLADAGFIKQYGDCLGDIAARDLICAQKFNGLTVLPPLLTDEMIAQYTSALLAGTITCGWTFGAGPCLQIPFAMQMAYRFNGIGVTQNVLYENQKLIANQFNSAIGKIQDSLSSTPSALGKLQDVVNQNAQALNTLVKQLSSNFGAISSVLNDILSRLDKVEAEVQIDRLITGRLQSLQTYVTQQLIRAAEIRASANLAATKMSECVLGQSKRVDFCGKGYHLMSFPQSAPHGVVFLHVTYVPAQEKNFTTAPAICHDGKAHFPREGVFVSNGTHWFVTQRNFYEPQIITTDNTFVSGNCDVVIGIVNNTVYDPLQPELDSFKEELDKYFKNHTSPDVDLGDISGINASVVNIQKEIDRLNEVAKNLNESLIDLQELGKYEQYIKWPWYIWLGFIAGLIAIVMVTIMLCCMTSCCSCLKGCCSCGSCCKFDEDDSEPVLKGVKLHYT

SEQ ID NO: 291 - protein, 1273 aa, Artificial Sequence
  source: /note="Description of Artificial Sequence: Synthetic polypeptide"
MFVFLVLLPLVSSQCVNLTTRTQLPPAYTNSFTRGVYYPDKVFRSSVLHSTQDLFLPFFSNVTWFHAIHVSGTNGTKRFDNPVLPFNDGVYFASTEKSNIIRGWIFGTTLDSKTQSLLIVNNATNVVIKVCEFQFCNDPFLGVYYHKNNKSWMESEFRVYSSANNCTFEYVSQPFLMDLEGKQGNFKNLREFVFKNIDGYFKIYSKHTPINLVRDLPQGFSALEPLVDLPIGINITRFQTLLALHRSYLTPGDSSSGWTAGAAAYYVGYLQPRTFLLKYNENGTITDAVDCALDPLSETKCTLKSFTVEKGIYQTSNFRVQPTESIVRFPNITNLCPFGEVFNATRFASVYAWNRKRISNCVADYSVLYNSASFSTFKCYGVSPTKLNDLCFTNVYADSFVIRGDEVRQIAPGQTGKIADYNYKLPDDFTGCVIAWNSNNLDSKVGGNYNYLYRLFRKSNLKPFERDISTEIYQAGSTPCNGVEGFNCYFPLQSYGFQPTNGVGYQPYRVVVLSFELLHAPATVCGPKKSTPLVKNKCVNFNFNGLTGTGVLTESNKKFLPFQQFGRDIADTTDAVRDPQTLEILDITPCSFGGVSVITPGTNTSNQVAVLYQDVNCTEVPVAIHADQLTPTWRVYSTGSNVFQTRAGCLIGAEHVNNSYECDIPIGAGICASYQTQTNSPRRARSVASQSIIAYTMSLGAENSVAYSNNSIAIPTNFTISVTTEILPVSMTKTSVDCTMYICGDSTECSNLLLQYGSFCTQLNRALTGIAVEQDKNTQEVFAQVKQIYKTPPIKDFGGFNFSQILPDPSKPSKRSFIEDLLFNKVTLADAGFIKQYGDCLGDIAARDLICAQKFNGLTVLPPLLTDEMIAQYTSALLACTITSGWTCGAGPALQIPFAMQMAYRFNGIGVTQNVLYENQKLIANQFNSAIGKIQDSLSSTPSALGKLQDVVNQNAQALNTLVKQLSSNFGAISSVLNDILSRLDKVEAEVQIDRLITGRLQSLQTYVTQQLIRAAEIRASANLAATKMSECVLGQSKRVDFCGKGYHLMSFPQSAPHGVVFLHVTYVPAQEKNFTTAPAICHDGKAHFPREGVFVSNGTHWFVTQRNFYEPQIITTDNTFVSGNCDVVIGIVNNTVYDPLQPELDSFKEELDKYFKNHTSPDVDLGDISGINASVVNIQKEIDRLNEVAKNLNESLIDLQELGKYEQYIKWPWYIWLGFIAGLIAIVMVTIMLCCMTSCCSCLKGCCSCGSCCKFDEDDSEPVLKGVKLHYT

SEQ ID NO: 292 - protein, 1273 aa, Artificial Sequence
  source: /note="Description of Artificial Sequence: Synthetic polypeptide"
MFVFLVLLPLVSSQCVNLTTRTQLPPAYTNSFTRGVYYPDKVFRSSVLHSTQDLFLPFFSNVTWFHAIHVSGTNGTKRFDNPVLPFNDGVYFASTEKSNIIRGWIFGTTLDSKTQSLLIVNNATNVVIKVCEFQFCNDPFLGVYYHKNNKSWMESEFRVYSSANNCTFEYVSQPFLMDLEGKQGNFKNLREFVFKNIDGYFKIYSKHTPINLVRDLPQGFSALEPLVDLPIGINITRFQTLLALHRSYLTPGDSSSGWTAGAAAYYVGYLQPRTFLLKYNENGTITDAVDCALDPLSETKCTLKSFTVEKGIYQTSNFRVQPTESIVRFPNITNLCPFGEVFNATRFASVYAWNRKRISNCVADYSVLYNSASFSTFKCYGVSPTKLNDLCFTNVYADSFVIRGDEVRQIAPGQTGKIADYNYKLPDDFTGCVIAWNSNNLDSKVGGNYNYLYRLFRKSNLKPFERDISTEIYQAGSTPCNGVEGFNCYFPLQSYGFQPTNGVGYQPYRVVVLSFELLHAPATVCGPKKSTPLVKNKCVNFNFNGLTGTGVLTESNKKFLPFQQFGRDIADTTDAVRDPQTLEILDITPCSFGGVSVITPGTNTSNQVAVLYQDVNCTEVPVAIHADQLTPTWRVYSTGSNVFQTRAGCLIGAEHVNNSYECDIPIGAGICASYQTQTNSPRRARSVASQSIIAYTMSLGAENSVAYSNNSIAIPTNFTISVTTEILPVSMTKTSVDCTMYICGDSTECSNLLLQYGSFCTQLNRALTGIAVEQDKNTQEVFAQVKQIYKTPPIKDFGGFNFSQILPDPSKPSKRSFIEDLLFNKVTLADAGFIKQYGDCLGDIAARDLICAQKFNGLTVLPPLLTDEMIAQYTSALLAGTITCGWTFGAGPCLQIPFAMQMAYRFNGIGVTQNVLYENQKLIANQFNSAIGKIQDSLSSTPSALGKLQDVVNQNAQALNTLVKQLSSNFGAISSVLNDILSRLDKVEAEVQIDRLITGRLQSLQTYVTQQLIRAAEIRASANLAATKMSECVLGQSKRVDFCGKGYHLMSFPQSAPHGVVFLHVTYVPAQEKNFTTAPAICHDGKAHFPREGVFVSNGTHWFVTQRNFYEPQIITTDNTFVSGNCDVVIGIVNNTVYDPLQPELDSFKEELDKYFKNHTSPDVDLGDISGINASVVNIQKEIDRLNEVAKNLNESLIDLQELGKYEQYIKWPWYIWLGFIAGLIAIVMVTIMLCCMTSCCSCLKGCCSCGSCCKFDEDDSEPVLKGVKLHYT

SEQ ID NO: 293 - protein, 1273 aa, Artificial Sequence
  source: /note="Description of Artificial Sequence: Synthetic polypeptide"
MFVFLVLLPLVSSQCVNLTTRTQLPPAYTNSFTRGVYYPDKVFRSSVLHSTQDLFLPFFSNVTWFHAIHVSGTNGTKRFDNPVLPFNDGVYFASTEKSNIIRGWIFGTTLDSKTQSLLIVNNATNVVIKVCEFQFCNDPFLGVYYHKNNKSWMESEFRVYSSANNCTFEYVSQPFLMDLEGKQGNFKNLREFVFKNIDGYFKIYSKHTPINLVRDLPQGFSALEPLVDLPIGINITRFQTLLALHRSYLTPGDSSSGWTAGAAAYYVGYLQPRTFLLKYNENGTITDAVDCALDPLSETKCTLKSFTVEKGIYQTSNFRVQPTESIVRFPNITNLCPFGEVFNATRFASVYAWNRKRISNCVADYSVLYNSASFSTFKCYGVSPTKLNDLCFTNVYADSFVIRGDEVRQIAPGQTGKIADYNYKLPDDFTGCVIAWNSNNLDSKVGGNYNYLYRLFRKSNLKPFERDISTEIYQAGSTPCNGVEGFNCYFPLQSYGFQPTNGVGYQPYRVVVLSFELLHAPATVCGPKKSTPLVKNKCVNFNFNGLTGTGVLTESNKKFLPFQQFGRDIADITDAVRDPQTLEILDITPCSFGGVSVITPGTNTSNQVAVLYQNVNCTEVPVAIHADQLTPTWRVYSTGSNVFQTRAGCLIGAEHVNNSYECDIPIGAGICASYQTQTNSPRRARSVASQSIIAYTMSLGAENSVAYSNNSIAIPTNFTISVTTEILPVSMTKTSVDCTMYICGDSTECSNLLLQYGSFCTQLNRALTGIAVEQDKNTQEVFAQVKQIYKTPPIKDFGGFNFSQILPDPSKPSKRSFIEDLLFNKVTLADAGFIKQYGDCLGDIAARDLICAQKFNGLTVLPPLLTDEMIAQYTSALLAGTITSGWTFGAGAALQIPFAMQMAYRFNGIGVTQNVLYENQKLIANQFNSAIGKIQDSLSSTPSALGKLQDVVNQNAQALNTLVKQLSSNFGAISSVLNDILSRLDKVEAEVQIDRLITGRLQSLQTYVTQQLIRAAEIRASANLAATKMSECVLGQSKRVDFCGKGYHLMSFPQSAPHGVVFLHVTYVPAQEKNFTTAPAICHDGKAHFPREGVFVSNGTHWFVTQRNFYEPQIITTDNTFVSGNCDVVIGIVNNTVYDPLQPELDSFKEELDKYFKNHTSPDVDLGDISGINASVVNIQKEIDRLNEVAKNLNESLIDLQELGKYEQYIKWPWYIWLGFIAGLIAIVMVTIMLCCMTSCCSCLKGCCSCGSCCKFDEDDSEPVLKGVKLHYT

SEQ ID NO: 294 - protein, 1273 aa, Artificial Sequence
  source: /note="Description of Artificial Sequence: Synthetic polypeptide"
MFVFLVLLPLVSSQCVNLTTRTQLPPAYTNSFTRGVYYPDKVFRSSVLHSTQDLFLPFFSNVTWFHAIHVSGTNGTKRFDNPVLPFNDGVYFASTEKSNIIRGWIFGTTLDSKTQSLLIVNNATNVVIKVCEFQFCNDPFLGVYYHKNNKSWMESEFRVYSSANNCTFEYVSQPFLMDLEGKQGNFKNLREFVFKNIDGYFKIYSKHTPINLVRDLPQGFSALEPLVDLPIGINITRFQTLLALHRSYLTPGDSSSGWTAGAAAYYVGYLQPRTFLLKYNENGTITDAVDCALDPLSETKCTLKSFTVEKGIYQTSNFRVQPTESIVRFPNITNLCPFGEVFNATRFASVYAWNRKRISNCVADYSVLYNSASFSTFKCYGVSPTKLNDLCFTNVYADSFVIRGDEVRQIAPGQTGKIADYNYKLPDDFTGCVIAWNSNNLDSKVGGNYNYLYRLFRKSNLKPFERDISTEIYQAGSTPCNGVEGFNCYFPLQSYGFQPTNGVGYQPYRVVVLSFELLHAPATVCGPKKSTNLVKNKCVNFNFNGLTGTGVLTESNKKFLPFQQFGRDIADITDAVRDPQTLEILDITPCSFGGVSVITPGTNTSNQVAVLYQNVNCTEVPVAIHADQLTPTWRVYSTGSNVFQTRAGCLIGAEHVNNSYECDIPIGAGICASYQTQTNSPRRARSVASQSIIAYTMSLGAENSVAYSNNSIAIPTNFTISVTTEILPVSMTKTSVDCTMYICGDSTECSNLLLQYGSFCTQLNRALTGIAVEQDKNTQEVFAQVKQIYKTPPIKDFGGFNFSQILPDPSKPSKRSFIEDLLFNKVTLADAGFIKQYGDCLGDIAARDLICAQKFNGLTVLPPLLTDEMIAQYTSALLACTITSGWTCGAGAALQIPFAMQMAYRFNGIGVTQNVLYENQKLIANQFNSAIGKIQDSLSSTPSALGKLQDVVNQNAQALNTLVKQLSSNFGAISSVLNDILSRLDKVEAEVQIDRLITGRLQSLQTYVTQQLIRAAEIRASANLAATKMSECVLGQSKRVDFCGKGYHLMSFPQSAPHGVVFLHVTYVPAQEKNFTTAPAICHDGKAHFPREGVFVSNGTHWFVTQRNFYEPQIITTDNTFVSGNCDVVIGIVNNTVYDPLQPELDSFKEELDKYFKNHTSPDVDLGDISGINASVVNIQKEIDRLNEVAKNLNESLIDLQELGKYEQYIKWPWYIWLGFIAGLIAIVMVTIMLCCMTSCCSCLKGCCSCGSCCKFDEDDSEPVLKGVKLHYT

SEQ ID NO: 295 - protein, 1273 aa, Artificial Sequence
  source: /note="Description of Artificial Sequence: Synthetic polypeptide"
MFVFLVLLPLVSSQCVNLTTRTQLPPAYTNSFTRGVYYPDKVFRSSVLHSTQDLFLPFFSNVTWFHAIHVSGTNGTKRFDNPVLPFNDGVYFASTEKSNIIRGWIFGTTLDSKTQSLLIVNNATNVVIKVCEFQFCNDPFLGVYYHKNNKSWMESEFRVYSSANNCTFEYVSQPFLMDLEGKQGNFKNLREFVFKNIDGYFKIYSKHTPINLVRDLPQGFSALEPLVDLPIGINITRFQTLLALHRSYLTPGDSSSGWTAGAAAYYVGYLQPRTFLLKYNENGTITDAVDCALDPLSETKCTLKSFTVEKGIYQTSNFRVQPTESIVRFPNITNLCPFGEVFNATRFASVYAWNRKRISNCVADYSVLYNSASFSTFKCYGVSPTKLNDLCFTNVYADSFVIRGDEVRQIAPGQTGKIADYNYKLPDDFTGCVIAWNSNNLDSKVGGNYNYLYRLFRKSNLKPFERDISTEIYQAGSTPCNGVEGFNCYFPLQSYGFQPTNGVGYQPYRVVVLSFELLHAPATVCGPKKSTNLVKNKCVNFNFNGLTGTGVLTESNKKFLPFQQFGRDIADITDAVRDPQTLEILDITPCSFGGVSVITPGTNTSNQVAVLYQNVNCTEVPVAIHADQLTPTWRVYSTGSNVFQTRAGCLIGAEHVNNSYECDIPIGAGICASYQTQTNSPRRARSVASQSIIAYTMSLGAENSVAYSNNSIAIPTNFTISVTTEILPVSMTKTSVDCTMYICGDSTECSNLLLQYGSFCTQLNRALTGIAVEQDKNTQEVFAQVKQIYKTPPIKDFGGFNFSQILPDPSKPSKRSFIEDLLFNKVTLADAGFIKQYGDCLGDIAARDLICAQKFNGLTVLPPLLTDEMIAQYTSALLAGTITCGWTFGAGACLQIPFAMQMAYRFNGIGVTQNVLYENQKLIANQFNSAIGKIQDSLSSTPSALGKLQDVVNQNAQALNTLVKQLSSNFGAISSVLNDILSRLDKVEAEVQIDRLITGRLQSLQTYVTQQLIRAAEIRASANLAATKMSECVLGQSKRVDFCGKGYHLMSFPQSAPHGVVFLHVTYVPAQEKNFTTAPAICHDGKAHFPREGVFVSNGTHWFVTQRNFYEPQIITTDNTFVSGNCDVVIGIVNNTVYDPLQPELDSFKEELDKYFKNHTSPDVDLGDISGINASVVNIQKEIDRLNEVAKNLNESLIDLQELGKYEQYIKWPWYIWLGFIAGLIAIVMVTIMLCCMTSCCSCLKGCCSCGSCCKFDEDDSEPVLKGVKLHYT

SEQ ID NO: 296 - protein, 1273 aa, Artificial Sequence
  source: /note="Description of Artificial Sequence: Synthetic polypeptide"
MFVFLVLLPLVSSQCVNLTTRTQLPPAYTNSFTRGVYYPDKVFRSSVLHSTQDLFLPFFSNVTWFHAIHVSGTNGTKRFDNPVLPFNDGVYFASTEKSNIIRGWIFGTTLDSKTQSLLIVNNATNVVIKVCEFQFCNDPFLGVYYHKNNKSWMESEFRVYSSANNCTFEYVSQPFLMDLEGKQGNFKNLREFVFKNIDGYFKIYSKHTPINLVRDLPQGFSALEPLVDLPIGINITRFQTLLALHRSYLTPGDSSSGWTAGAAAYYVGYLQPRTFLLKYNENGTITDAVDCALDPLSETKCTLKSFTVEKGIYQTSNFRVQPTESIVRFPNITNLCPFGEVFNATRFASVYAWNRKRISNCVADYSVLYNSASFSTFKCYGVSPTKLNDLCFTNVYADSFVIRGDEVRQIAPGQTGKIADYNYKLPDDFTGCVIAWNSNNLDSKVGGNYNYLYRLFRKSNLKPFERDISTEIYQAGSTPCNGVEGFNCYFPLQSYGFQPTNGVGYQPYRVVVLSFELLHAPATVCGPKKSTPLVKNKCVNFNFNGLTGTGVLTESNKKFLPFQQFGRDIADTTDAVRDPQTLEILDITPCSFGGVSVITPGTNTSNQVAVLYQNVNCTEVPVAIHADQLTPTWRVYSTGSNVFQTRAGCLIGAEHVNNSYECDIPIGAGICASYQTQTNSPRRARSVASQSIIAYTMSLGAENSVAYSNNSIAIPTNFTISVTTEILPVSMTKTSVDCTMYICGDSTECSNLLLQYGSFCTQLNRALTGIAVEQDKNTQEVFAQVKQIYKTPPIKDFGGFNFSQILPDPSKPSKRSFIEDLLFNKVTLADAGFIKQYGDCLGDIAARDLICAQKFNGLTVLPPLLTDEMIAQYTSALLACTITSGWTCGAGAALQIPFAMQMAYRFNGIGVTQNVLYENQKLIANQFNSAIGKIQDSLSSTPSALGKLQDVVNQNAQALNTLVKQLSSNFGAISSVLNDILSRLDKVEAEVQIDRLITGRLQSLQTYVTQQLIRAAEIRASANLAATKMSECVLGQSKRVDFCGKGYHLMSFPQSAPHGVVFLHVTYVPAQEKNFTTAPAICHDGKAHFPREGVFVSNGTHWFVTQRNFYEPQIITTDNTFVSGNCDVVIGIVNNTVYDPLQPELDSFKEELDKYFKNHTSPDVDLGDISGINASVVNIQKEIDRLNEVAKNLNESLIDLQELGKYEQYIKWPWYIWLGFIAGLIAIVMVTIMLCCMTSCCSCLKGCCSCGSCCKFDEDDSEPVLKGVKLHYT

SEQ ID NO: 297 - protein, 1273 aa, Artificial Sequence
  source: /note="Description of Artificial Sequence: Synthetic polypeptide"
MFVFLVLLPLVSSQCVNLTTRTQLPPAYTNSFTRGVYYPDKVFRSSVLHSTQDLFLPFFSNVTWFHAIHVSGTNGTKRFDNPVLPFNDGVYFASTEKSNIIRGWIFGTTLDSKTQSLLIVNNATNVVIKVCEFQFCNDPFLGVYYHKNNKSWMESEFRVYSSANNCTFEYVSQPFLMDLEGKQGNFKNLREFVFKNIDGYFKIYSKHTPINLVRDLPQGFSALEPLVDLPIGINITRFQTLLALHRSYLTPGDSSSGWTAGAAAYYVGYLQPRTFLLKYNENGTITDAVDCALDPLSETKCTLKSFTVEKGIYQTSNFRVQPTESIVRFPNITNLCPFGEVFNATRFASVYAWNRKRISNCVADYSVLYNSASFSTFKCYGVSPTKLNDLCFTNVYADSFVIRGDEVRQIAPGQTGKIADYNYKLPDDFTGCVIAWNSNNLDSKVGGNYNYLYRLFRKSNLKPFERDISTEIYQAGSTPCNGVEGFNCYFPLQSYGFQPTNGVGYQPYRVVVLSFELLHAPATVCGPKKSTPLVKNKCVNFNFNGLTGTGVLTESNKKFLPFQQFGRDIADTTDAVRDPQTLEILDITPCSFGGVSVITPGTNTSNQVAVLYQNVNCTEVPVAIHADQLTPTWRVYSTGSNVFQTRAGCLIGAEHVNNSYECDIPIGAGICASYQTQTNSPRRARSVASQSIIAYTMSLGAENSVAYSNNSIAIPTNFTISVTTEILPVSMTKTSVDCTMYICGDSTECSNLLLQYGSFCTQLNRALTGIAVEQDKNTQEVFAQVKQIYKTPPIKDFGGFNFSQILPDPSKPSKRSFIEDLLFNKVTLADAGFIKQYGDCLGDIAARDLICAQKFNGLTVLPPLLTDEMIAQYTSALLAGTITCGWTFGAGACLQIPFAMQMAYRFNGIGVTQNVLYENQKLIANQFNSAIGKIQDSLSSTPSALGKLQDVVNQNAQALNTLVKQLSSNFGAISSVLNDILSRLDKVEAEVQIDRLITGRLQSLQTYVTQQLIRAAEIRASANLAATKMSECVLGQSKRVDFCGKGYHLMSFPQSAPHGVVFLHVTYVPAQEKNFTTAPAICHDGKAHFPREGVFVSNGTHWFVTQRNFYEPQIITTDNTFVSGNCDVVIGIVNNTVYDPLQPELDSFKEELDKYFKNHTSPDVDLGDISGINASVVNIQKEIDRLNEVAKNLNESLIDLQELGKYEQYIKWPWYIWLGFIAGLIAIVMVTIMLCCMTSCCSCLKGCCSCGSCCKFDEDDSEPVLKGVKLHYT

SEQ ID NO: 298 - protein, 1273 aa, Artificial Sequence
  source: /note="Description of Artificial Sequence: Synthetic polypeptide"
MFVFLVLLPLVSSQCVNLTTRTQLPPAYTNSFTRGVYYPDKVFRSSVLHSTQDLFLPFFSNVTWFHAIHVSGTNGTKRFDNPVLPFNDGVYFASTEKSNIIRGWIFGTTLDSKTQSLLIVNNATNVVIKVCEFQFCNDPFLGVYYHKNNKSWMESEFRVYSSANNCTFEYVSQPFLMDLEGKQGNFKNLREFVFKNIDGYFKIYSKHTPINLVRDLPQGFSALEPLVDLPIGINITRFQTLLALHRSYLTPGDSSSGWTAGAAAYYVGYLQPRTFLLKYNENGTITDAVDCALDPLSETKCTLKSFTVEKGIYQTSNFRVQPTESIVRFPNITNLCPFGEVFNATRFASVYAWNRKRISNCVADYSVLYNSASFSTFKCYGVSPTKLNDLCFTNVYADSFVIRGDEVRQIAPGQTGKIADYNYKLPDDFTGCVIAWNSNNLDSKVGGNYNYLYRLFRKSNLKPFERDISTEIYQAGSTPCNGVEGFNCYFPLQSYGFQPTNGVGYQPYRVVVLSFELLHAPATVCGPKKSTPLVKNKCVNFNFNGLTGTGVLTESNKKFLPFQQFGRDIADITDAVRDPQTLEILDITPCSFGGVSVITPGTNTSNQVAVLYQDVNCTEVPVAIHADQLTPTWRVYSTGSNVFQTRAGCLIGAEHVNNSYECDIPIGAGICASYQTQTNSPRRARSVASQSIIAYTMSLGAENSVAYSNNSIAIPTNFTISVTTEILPVSMTKTSVDCTMYICGDSTECSNLLLQYGSFCTQLNRALTGIAVEQDKNTQEVFAQVKQIYKTPPIKDFGGFNFSQILPDPSKPSKRSFIEDLLFNKVTLADAGFIKQYGDCLGDIAARDLICAQKFNGLTVLPPLLTDEMIAQYTSALLACTITSGWTCGAGAALQIPFAMQMAYRFNGIGVTQNVLYENQKLIANQFNSAIGKIQDSLSSTPSALGKLQDVVNQNAQALNTLVKQLSSNFGAISSVLNDILSRLDKVEAEVQIDRLITGRLQSLQTYVTQQLIRAAEIRASANLAATKMSECVLGQSKRVDFCGKGYHLMSFPQSAPHGVVFLHVTYVPAQEKNFTTAPAICHDGKAHFPREGVFVSNGTHWFVTQRNFYEPQIITTDNTFVSGNCDVVIGIVNNTVYDPLQPELDSFKEELDKYFKNHTSPDVDLGDISGINASVVNIQKEIDRLNEVAKNLNESLIDLQELGKYEQYIKWPWYIWLGFIAGLIAIVMVTIMLCCMTSCCSCLKGCCSCGSCCKFDEDDSEPVLKGVKLHYT

SEQ ID NO: 299 - protein, 1273 aa, Artificial Sequence
  source: /note="Description of Artificial Sequence: Synthetic polypeptide"
MFVFLVLLPLVSSQCVNLTTRTQLPPAYTNSFTRGVYYPDKVFRSSVLHSTQDLFLPFFSNVTWFHAIHVSGTNGTKRFDNPVLPFNDGVYFASTEKSNIIRGWIFGTTLDSKTQSLLIVNNATNVVIKVCEFQFCNDPFLGVYYHKNNKSWMESEFRVYSSANNCTFEYVSQPFLMDLEGKQGNFKNLREFVFKNIDGYFKIYSKHTPINLVRDLPQGFSALEPLVDLPIGINITRFQTLLALHRSYLTPGDSSSGWTAGAAAYYVGYLQPRTFLLKYNENGTITDAVDCALDPLSETKCTLKSFTVEKGIYQTSNFRVQPTESIVRFPNITNLCPFGEVFNATRFASVYAWNRKRISNCVADYSVLYNSASFSTFKCYGVSPTKLNDLCFTNVYADSFVIRGDEVRQIAPGQTGKIADYNYKLPDDFTGCVIAWNSNNLDSKVGGNYNYLYRLFRKSNLKPFERDISTEIYQAGSTPCNGVEGFNCYFPLQSYGFQPTNGVGYQPYRVVVLSFELLHAPATVCGPKKSTPLVKNKCVNFNFNGLTGTGVLTESNKKFLPFQQFGRDIADITDAVRDPQTLEILDITPCSFGGVSVITPGTNTSNQVAVLYQDVNCTEVPVAIHADQLTPTWRVYSTGSNVFQTRAGCLIGAEHVNNSYECDIPIGAGICASYQTQTNSPRRARSVASQSIIAYTMSLGAENSVAYSNNSIAIPTNFTISVTTEILPVSMTKTSVDCTMYICGDSTECSNLLLQYGSFCTQLNRALTGIAVEQDKNTQEVFAQVKQIYKTPPIKDFGGFNFSQILPDPSKPSKRSFIEDLLFNKVTLADAGFIKQYGDCLGDIAARDLICAQKFNGLTVLPPLLTDEMIAQYTSALLAGTITCGWTFGAGACLQIPFAMQMAYRFNGIGVTQNVLYENQKLIANQFNSAIGKIQDSLSSTPSALGKLQDVVNQNAQALNTLVKQLSSNFGAISSVLNDILSRLDKVEAEVQIDRLITGRLQSLQTYVTQQLIRAAEIRASANLAATKMSECVLGQSKRVDFCGKGYHLMSFPQSAPHGVVFLHVTYVPAQEKNFTTAPAICHDGKAHFPREGVFVSNGTHWFVTQRNFYEPQIITTDNTFVSGNCDVVIGIVNNTVYDPLQPELDSFKEELDKYFKNHTSPDVDLGDISGINASVVNIQKEIDRLNEVAKNLNESLIDLQELGKYEQYIKWPWYIWLGFIAGLIAIVMVTIMLCCMTSCCSCLKGCCSCGSCCKFDEDDSEPVLKGVKLHYT

SEQ ID NO: 300 - protein, 1273 aa, Artificial Sequence
  source: /note="Description of Artificial Sequence: Synthetic polypeptide"
MFVFLVLLPLVSSQCVNLTTRTQLPPAYTNSFTRGVYYPDKVFRSSVLHSTQDLFLPFFSNVTWFHAIHVSGTNGTKRFDNPVLPFNDGVYFASTEKSNIIRGWIFGTTLDSKTQSLLIVNNATNVVIKVCEFQFCNDPFLGVYYHKNNKSWMESEFRVYSSANNCTFEYVSQPFLMDLEGKQGNFKNLREFVFKNIDGYFKIYSKHTPINLVRDLPQGFSALEPLVDLPIGINITRFQTLLALHRSYLTPGDSSSGWTAGAAAYYVGYLQPRTFLLKYNENGTITDAVDCALDPLSETKCTLKSFTVEKGIYQTSNFRVQPTESIVRFPNITNLCPFGEVFNATRFASVYAWNRKRISNCVADYSVLYNSASFSTFKCYGVSPTKLNDLCFTNVYADSFVIRGDEVRQIAPGQTGKIADYNYKLPDDFTGCVIAWNSNNLDSKVGGNYNYLYRLFRKSNLKPFERDISTEIYQAGSTPCNGVEGFNCYFPLQSYGFQPTNGVGYQPYRVVVLSFELLHAPATVCGPKKSTPLVKNKCVNFNFNGLTGTGVLTESNKKFLPFQQFGRDIADITDAVRDPQTLEILDITPCSFGGVSVITPGTNTSNQVAVLYQNVNCTEVPVAIHADQLTPTWRVYSTGSNVFQTRAGCLIGAEHVNNSYECDIPIGAGICASYQTQTNSPRRARSVASQSIIAYTMSLGAENSVAYSNNSIAIPTNFTISVTTEILPVSMTKTSVDCTMYICGDSTECSNLLLQYGSFCTQLNRALTGIAVEQDKNTQEVFAQVKQIYKTPPIKDFGGFNFSQILPDPSKPSKRSFIEDLLFNKVTLADAGFIKQYGDCLGDIAARDLICAQKFNGLTVLPPLLTDEMIAQYTSALLAGTITSGWTFGAGPALQIPFAMQMAYRFNGIGVTQNVLYENQKLIANQFNSAIGKIQDSLSSTASALGKLQDVVNQNAQALNTLVKQLSSNFGAISSVLNDILSRLDKVEAEVQIDRLITGRLQSLQTYVTQQLIRAAEIRASANLAATKMSECVLGQSKRVDFCGKGYHLMSFPQSAPHGVVFLHVTYVPAQEKNFTTAPAICHDGKAHFPREGVFVSNGTHWFVTQRNFYEPQIITTDNTFVSGNCDVVIGIVNNTVYDPLQPELDSFKEELDKYFKNHTSPDVDLGDISGINASVVNIQKEIDRLNEVAKNLNESLIDLQELGKYEQYIKWPWYIWLGFIAGLIAIVMVTIMLCCMTSCCSCLKGCCSCGSCCKFDEDDSEPVLKGVKLHYT

SEQ ID NO: 301 - protein, 1273 aa, Artificial Sequence
  source: /note="Description of Artificial Sequence: Synthetic polypeptide"
MFVFLVLLPLVSSQCVNLTTRTQLPPAYTNSFTRGVYYPDKVFRSSVLHSTQDLFLPFFSNVTWFHAIHVSGTNGTKRFDNPVLPFNDGVYFASTEKSNIIRGWIFGTTLDSKTQSLLIVNNATNVVIKVCEFQFCNDPFLGVYYHKNNKSWMESEFRVYSSANNCTFEYVSQPFLMDLEGKQGNFKNLREFVFKNIDGYFKIYSKHTPINLVRDLPQGFSALEPLVDLPIGINITRFQTLLALHRSYLTPGDSSSGWTAGAAAYYVGYLQPRTFLLKYNENGTITDAVDCALDPLSETKCTLKSFTVEKGIYQTSNFRVQPTESIVRFPNITNLCPFGEVFNATRFASVYAWNRKRISNCVADYSVLYNSASFSTFKCYGVSPTKLNDLCFTNVYADSFVIRGDEVRQIAPGQTGKIADYNYKLPDDFTGCVIAWNSNNLDSKVGGNYNYLYRLFRKSNLKPFERDISTEIYQAGSTPCNGVEGFNCYFPLQSYGFQPTNGVGYQPYRVVVLSFELLHAPATVCGPKKSTNLVKNKCVNFNFNGLTGTGVLTESNKKFLPFQQFGRDIADITDAVRDPQTLEILDITPCSFGGVSVITPGTNTSNQVAVLYQNVNCTEVPVAIHADQLTPTWRVYSTGSNVFQTRAGCLIGAEHVNNSYECDIPIGAGICASYQTQTNSPRRARSVASQSIIAYTMSLGAENSVAYSNNSIAIPTNFTISVTTEILPVSMTKTSVDCTMYICGDSTECSNLLLQYGSFCTQLNRALTGIAVEQDKNTQEVFAQVKQIYKTPPIKDFGGFNFSQILPDPSKPSKRSFIEDLLFNKVTLADAGFIKQYGDCLGDIAARDLICAQKFNGLTVLPPLLTDEMIAQYTSALLACTITSGWTCGAGPALQIPFAMQMAYRFNGIGVTQNVLYENQKLIANQFNSAIGKIQDSLSSTASALGKLQDVVNQNAQALNTLVKQLSSNFGAISSVLNDILSRLDKVEAEVQIDRLITGRLQSLQTYVTQQLIRAAEIRASANLAATKMSECVLGQSKRVDFCGKGYHLMSFPQSAPHGVVFLHVTYVPAQEKNFTTAPAICHDGKAHFPREGVFVSNGTHWFVTQRNFYEPQIITTDNTFVSGNCDVVIGIVNNTVYDPLQPELDSFKEELDKYFKNHTSPDVDLGDISGINASVVNIQKEIDRLNEVAKNLNESLIDLQELGKYEQYIKWPWYIWLGFIAGLIAIVMVTIMLCCMTSCCSCLKGCCSCGSCCKFDEDDSEPVLKGVKLHYT

SEQ ID NO: 302 - protein, 1273 aa, Artificial Sequence
  source: /note="Description of Artificial Sequence: Synthetic polypeptide"
MFVFLVLLPLVSSQCVNLTTRTQLPPAYTNSFTRGVYYPDKVFRSSVLHSTQDLFLPFFSNVTWFHAIHVSGTNGTKRFDNPVLPFNDGVYFASTEKSNIIRGWIFGTTLDSKTQSLLIVNNATNVVIKVCEFQFCNDPFLGVYYHKNNKSWMESEFRVYSSANNCTFEYVSQPFLMDLEGKQGNFKNLREFVFKNIDGYFKIYSKHTPINLVRDLPQGFSALEPLVDLPIGINITRFQTLLALHRSYLTPGDSSSGWTAGAAAYYVGYLQPRTFLLKYNENGTITDAVDCALDPLSETKCTLKSFTVEKGIYQTSNFRVQPTESIVRFPNITNLCPFGEVFNATRFASVYAWNRKRISNCVADYSVLYNSASFSTFKCYGVSPTKLNDLCFTNVYADSFVIRGDEVRQIAPGQTGKIADYNYKLPDDFTGCVIAWNSNNLDSKVGGNYNYLYRLFRKSNLKPFERDISTEIYQAGSTPCNGVEGFNCYFPLQSYGFQPTNGVGYQPYRVVVLSFELLHAPATVCGPKKSTNLVKNKCVNFNFNGLTGTGVLTESNKKFLPFQQFGRDIADITDAVRDPQTLEILDITPCSFGGVSVITPGTNTSNQVAVLYQNVNCTEVPVAIHADQLTPTWRVYSTGSNVFQTRAGCLIGAEHVNNSYECDIPIGAGICASYQTQTNSPRRARSVASQSIIAYTMSLGAENSVAYSNNSIAIPTNFTISVTTEILPVSMTKTSVDCTMYICGDSTECSNLLLQYGSFCTQLNRALTGIAVEQDKNTQEVFAQVKQIYKTPPIKDFGGFNFSQILPDPSKPSKRSFIEDLLFNKVTLADAGFIKQYGDCLGDIAARDLICAQKFNGLTVLPPLLTDEMIAQYTSALLAGTITCGWTFGAGPCLQIPFAMQMAYRFNGIGVTQNVLYENQKLIANQFNSAIGKIQDSLSSTASALGKLQDVVNQNAQALNTLVKQLSSNFGAISSVLNDILSRLDKVEAEVQIDRLITGRLQSLQTYVTQQLIRAAEIRASANLAATKMSECVLGQSKRVDFCGKGYHLMSFPQSAPHGVVFLHVTYVPAQEKNFTTAPAICHDGKAHFPREGVFVSNGTHWFVTQRNFYEPQIITTDNTFVSGNCDVVIGIVNNTVYDPLQPELDSFKEELDKYFKNHTSPDVDLGDISGINASVVNIQKEIDRLNEVAKNLNESLIDLQELGKYEQYIKWPWYIWLGFIAGLIAIVMVTIMLCCMTSCCSCLKGCCSCGSCCKFDEDDSEPVLKGVKLHYT

SEQ ID NO: 303 - protein, 1273 aa, Artificial Sequence
  source: /note="Description of Artificial Sequence: Synthetic polypeptide"
MFVFLVLLPLVSSQCVNLTTRTQLPPAYTNSFTRGVYYPDKVFRSSVLHSTQDLFLPFFSNVTWFHAIHVSGTNGTKRFDNPVLPFNDGVYFASTEKSNIIRGWIFGTTLDSKTQSLLIVNNATNVVIKVCEFQFCNDPFLGVYYHKNNKSWMESEFRVYSSANNCTFEYVSQPFLMDLEGKQGNFKNLREFVFKNIDGYFKIYSKHTPINLVRDLPQGFSALEPLVDLPIGINITRFQTLLALHRSYLTPGDSSSGWTAGAAAYYVGYLQPRTFLLKYNENGTITDAVDCALDPLSETKCTLKSFTVEKGIYQTSNFRVQPTESIVRFPNITNLCPFGEVFNATRFASVYAWNRKRISNCVADYSVLYNSASFSTFKCYGVSPTKLNDLCFTNVYADSFVIRGDEVRQIAPGQTGKIADYNYKLPDDFTGCVIAWNSNNLDSKVGGNYNYLYRLFRKSNLKPFERDISTEIYQAGSTPCNGVEGFNCYFPLQSYGFQPTNGVGYQPYRVVVLSFELLHAPATVCGPKKSTPLVKNKCVNFNFNGLTGTGVLTESNKKFLPFQQFGRDIADTTDAVRDPQTLEILDITPCSFGGVSVITPGTNTSNQVAVLYQNVNCTEVPVAIHADQLTPTWRVYSTGSNVFQTRAGCLIGAEHVNNSYECDIPIGAGICASYQTQTNSPRRARSVASQSIIAYTMSLGAENSVAYSNNSIAIPTNFTISVTTEILPVSMTKTSVDCTMYICGDSTECSNLLLQYGSFCTQLNRALTGIAVEQDKNTQEVFAQVKQIYKTPPIKDFGGFNFSQILPDPSKPSKRSFIEDLLFNKVTLADAGFIKQYGDCLGDIAARDLICAQKFNGLTVLPPLLTDEMIAQYTSALLACTITSGWTCGAGPALQIPFAMQMAYRFNGIGVTQNVLYENQKLIANQFNSAIGKIQDSLSSTASALGKLQDVVNQNAQALNTLVKQLSSNFGAISSVLNDILSRLDKVEAEVQIDRLITGRLQSLQTYVTQQLIRAAEIRASANLAATKMSECVLGQSKRVDFCGKGYHLMSFPQSAPHGVVFLHVTYVPAQEKNFTTAPAICHDGKAHFPREGVFVSNGTHWFVTQRNFYEPQIITTDNTFVSGNCDVVIGIVNNTVYDPLQPELDSFKEELDKYFKNHTSPDVDLGDISGINASVVNIQKEIDRLNEVAKNLNESLIDLQELGKYEQYIKWPWYIWLGFIAGLIAIVMVTIMLCCMTSCCSCLKGCCSCGSCCKFDEDDSEPVLKGVKLHYT

SEQ ID NO: 304 - protein, 1273 aa, Artificial Sequence
  source: /note="Description of Artificial Sequence: Synthetic polypeptide"
MFVFLVLLPLVSSQCVNLTTRTQLPPAYTNSFTRGVYYPDKVFRSSVLHSTQDLFLPFFSNVTWFHAIHVSGTNGTKRFDNPVLPFNDGVYFASTEKSNIIRGWIFGTTLDSKTQSLLIVNNATNVVIKVCEFQFCNDPFLGVYYHKNNKSWMESEFRVYSSANNCTFEYVSQPFLMDLEGKQGNFKNLREFVFKNIDGYFKIYSKHTPINLVRDLPQGFSALEPLVDLPIGINITRFQTLLALHRSYLTPGDSSSGWTAGAAAYYVGYLQPRTFLLKYNENGTITDAVDCALDPLSETKCTLKSFTVEKGIYQTSNFRVQPTESIVRFPNITNLCPFGEVFNATRFASVYAWNRKRISNCVADYSVLYNSASFSTFKCYGVSPTKLNDLCFTNVYADSFVIRGDEVRQIAPGQTGKIADYNYKLPDDFTGCVIAWNSNNLDSKVGGNYNYLYRLFRKSNLKPFERDISTEIYQAGSTPCNGVEGFNCYFPLQSYGFQPTNGVGYQPYRVVVLSFELLHAPATVCGPKKSTPLVKNKCVNFNFNGLTGTGVLTESNKKFLPFQQFGRDIADTTDAVRDPQTLEILDITPCSFGGVSVITPGTNTSNQVAVLYQNVNCTEVPVAIHADQLTPTWRVYSTGSNVFQTRAGCLIGAEHVNNSYECDIPIGAGICASYQTQTNSPRRARSVASQSIIAYTMSLGAENSVAYSNNSIAIPTNFTISVTTEILPVSMTKTSVDCTMYICGDSTECSNLLLQYGSFCTQLNRALTGIAVEQDKNTQEVFAQVKQIYKTPPIKDFGGFNFSQILPDPSKPSKRSFIEDLLFNKVTLADAGFIKQYGDCLGDIAARDLICAQKFNGLTVLPPLLTDEMIAQYTSALLAGTITCGWTFGAGPCLQIPFAMQMAYRFNGIGVTQNVLYENQKLIANQFNSAIGKIQDSLSSTASALGKLQDVVNQNAQALNTLVKQLSSNFGAISSVLNDILSRLDKVEAEVQIDRLITGRLQSLQTYVTQQLIRAAEIRASANLAATKMSECVLGQSKRVDFCGKGYHLMSFPQSAPHGVVFLHVTYVPAQEKNFTTAPAICHDGKAHFPREGVFVSNGTHWFVTQRNFYEPQIITTDNTFVSGNCDVVIGIVNNTVYDPLQPELDSFKEELDKYFKNHTSPDVDLGDISGINASVVNIQKEIDRLNEVAKNLNESLIDLQELGKYEQYIKWPWYIWLGFIAGLIAIVMVTIMLCCMTSCCSCLKGCCSCGSCCKFDEDDSEPVLKGVKLHYT

SEQ ID NO: 305 - protein, 1273 aa, Artificial Sequence
  source: /note="Description of Artificial Sequence: Synthetic polypeptide"
MFVFLVLLPLVSSQCVNLTTRTQLPPAYTNSFTRGVYYPDKVFRSSVLHSTQDLFLPFFSNVTWFHAIHVSGTNGTKRFDNPVLPFNDGVYFASTEKSNIIRGWIFGTTLDSKTQSLLIVNNATNVVIKVCEFQFCNDPFLGVYYHKNNKSWMESEFRVYSSANNCTFEYVSQPFLMDLEGKQGNFKNLREFVFKNIDGYFKIYSKHTPINLVRDLPQGFSALEPLVDLPIGINITRFQTLLALHRSYLTPGDSSSGWTAGAAAYYVGYLQPRTFLLKYNENGTITDAVDCALDPLSETKCTLKSFTVEKGIYQTSNFRVQPTESIVRFPNITNLCPFGEVFNATRFASVYAWNRKRISNCVADYSVLYNSASFSTFKCYGVSPTKLNDLCFTNVYADSFVIRGDEVRQIAPGQTGKIADYNYKLPDDFTGCVIAWNSNNLDSKVGGNYNYLYRLFRKSNLKPFERDISTEIYQAGSTPCNGVEGFNCYFPLQSYGFQPTNGVGYQPYRVVVLSFELLHAPATVCGPKKSTPLVKNKCVNFNFNGLTGTGVLTESNKKFLPFQQFGRDIADITDAVRDPQTLEILDITPCSFGGVSVITPGTNTSNQVAVLYQDVNCTEVPVAIHADQLTPTWRVYSTGSNVFQTRAGCLIGAEHVNNSYECDIPIGAGICASYQTQTNSPRRARSVASQSIIAYTMSLGAENSVAYSNNSIAIPTNFTISVTTEILPVSMTKTSVDCTMYICGDSTECSNLLLQYGSFCTQLNRALTGIAVEQDKNTQEVFAQVKQIYKTPPIKDFGGFNFSQILPDPSKPSKRSFIEDLLFNKVTLADAGFIKQYGDCLGDIAARDLICAQKFNGLTVLPPLLTDEMIAQYTSALLACTITSGWTCGAGPALQIPFAMQMAYRFNGIGVTQNVLYENQKLIANQFNSAIGKIQDSLSSTASALGKLQDVVNQNAQALNTLVKQLSSNFGAISSVLNDILSRLDKVEAEVQIDRLITGRLQSLQTYVTQQLIRAAEIRASANLAATKMSECVLGQSKRVDFCGKGYHLMSFPQSAPHGVVFLHVTYVPAQEKNFTTAPAICHDGKAHFPREGVFVSNGTHWFVTQRNFYEPQIITTDNTFVSGNCDVVIGIVNNTVYDPLQPELDSFKEELDKYFKNHTSPDVDLGDISGINASVVNIQKEIDRLNEVAKNLNESLIDLQELGKYEQYIKWPWYIWLGFIAGLIAIVMVTIMLCCMTSCCSCLKGCCSCGSCCKFDEDDSEPVLKGVKLHYT

SEQ ID NO: 306 - protein, 1273 aa, Artificial Sequence
  source: /note="Description of Artificial Sequence: Synthetic polypeptide"
MFVFLVLLPLVSSQCVNLTTRTQLPPAYTNSFTRGVYYPDKVFRSSVLHSTQDLFLPFFSNVTWFHAIHVSGTNGTKRFDNPVLPFNDGVYFASTEKSNIIRGWIFGTTLDSKTQSLLIVNNATNVVIKVCEFQFCNDPFLGVYYHKNNKSWMESEFRVYSSANNCTFEYVSQPFLMDLEGKQGNFKNLREFVFKNIDGYFKIYSKHTPINLVRDLPQGFSALEPLVDLPIGINITRFQTLLALHRSYLTPGDSSSGWTAGAAAYYVGYLQPRTFLLKYNENGTITDAVDCALDPLSETKCTLKSFTVEKGIYQTSNFRVQPTESIVRFPNITNLCPFGEVFNATRFASVYAWNRKRISNCVADYSVLYNSASFSTFKCYGVSPTKLNDLCFTNVYADSFVIRGDEVRQIAPGQTGKIADYNYKLPDDFTGCVIAWNSNNLDSKVGGNYNYLYRLFRKSNLKPFERDISTEIYQAGSTPCNGVEGFNCYFPLQSYGFQPTNGVGYQPYRVVVLSFELLHAPATVCGPKKSTPLVKNKCVNFNFNGLTGTGVLTESNKKFLPFQQFGRDIADITDAVRDPQTLEILDITPCSFGGVSVITPGTNTSNQVAVLYQDVNCTEVPVAIHADQLTPTWRVYSTGSNVFQTRAGCLIGAEHVNNSYECDIPIGAGICASYQTQTNSPRRARSVASQSIIAYTMSLGAENSVAYSNNSIAIPTNFTISVTTEILPVSMTKTSVDCTMYICGDSTECSNLLLQYGSFCTQLNRALTGIAVEQDKNTQEVFAQVKQIYKTPPIKDFGGFNFSQILPDPSKPSKRSFIEDLLFNKVTLADAGFIKQYGDCLGDIAARDLICAQKFNGLTVLPPLLTDEMIAQYTSALLAGTITCGWTFGAGPCLQIPFAMQMAYRFNGIGVTQNVLYENQKLIANQFNSAIGKIQDSLSSTASALGKLQDVVNQNAQALNTLVKQLSSNFGAISSVLNDILSRLDKVEAEVQIDRLITGRLQSLQTYVTQQLIRAAEIRASANLAATKMSECVLGQSKRVDFCGKGYHLMSFPQSAPHGVVFLHVTYVPAQEKNFTTAPAICHDGKAHFPREGVFVSNGTHWFVTQRNFYEPQIITTDNTFVSGNCDVVIGIVNNTVYDPLQPELDSFKEELDKYFKNHTSPDVDLGDISGINASVVNIQKEIDRLNEVAKNLNESLIDLQELGKYEQYIKWPWYIWLGFIAGLIAIVMVTIMLCCMTSCCSCLKGCCSCGSCCKFDEDDSEPVLKGVKLHYT

SEQ ID NO: 307 - protein, 1273 aa, Artificial Sequence
  source: /note="Description of Artificial Sequence: Synthetic polypeptide"
MFVFLVLLPLVSSQCVNLTTRTQLPPAYTNSFTRGVYYPDKVFRSSVLHSTQDLFLPFFSNVTWFHAIHVSGTNGTKRFDNPVLPFNDGVYFASTEKSNIIRGWIFGTTLDSKTQSLLIVNNATNVVIKVCEFQFCNDPFLGVYYHKNNKSWMESEFRVYSSANNCTFEYVSQPFLMDLEGKQGNFKNLREFVFKNIDGYFKIYSKHTPINLVRDLPQGFSALEPLVDLPIGINITRFQTLLALHRSYLTPGDSSSGWTAGAAAYYVGYLQPRTFLLKYNENGTITDAVDCALDPLSETKCTLKSFTVEKGIYQTSNFRVQPTESIVRFPNITNLCPFGEVFNATRFASVYAWNRKRISNCVADYSVLYNSASFSTFKCYGVSPTKLNDLCFTNVYADSFVIRGDEVRQIAPGQTGKIADYNYKLPDDFTGCVIAWNSNNLDSKVGGNYNYLYRLFRKSNLKPFERDISTEIYQAGSTPCNGVEGFNCYFPLQSYGFQPTNGVGYQPYRVVVLSFELLHAPATVCGPKKSTPLVKNKCVNFNFNGLTGTGVLTESNKKFLPFQQFGRDIADITDAVRDPQTLEILDITPCSFGGVSVITPGTNTSNQVAVLYQNVNCTEVPVAIHADQLTPTWRVYSTGSNVFQTRAGCLIGAEHVNNSYECDIPIGAGICASYQTQTNSPRRARSVASQSIIAYTMSLGAENSVAYSNNSIAIPTNFTISVTTEILPVSMTKTSVDCTMYICGDSTECSNLLLQYGSFCTQLNRALTGIAVEQDKNTQEVFAQVKQIYKTPPIKDFGGFNFSQILPDPSKPSKRSFIEDLLFNKVTLADAGFIKQYGDCLGDIAARDLICAQKFNGLTVLPPLLTDEMIAQYTSALLACTITSGWTCGAGAALQIPFAMQMAYRFNGIGVTQNVLYENQKLIANQFNSAIGKIQDSLSSTASALGKLQDVVNQNAQALNTLVKQLSSNFGAISSVLNDILSRLDKVEAEVQIDRLITGRLQSLQTYVTQQLIRAAEIRASANLAATKMSECVLGQSKRVDFCGKGYHLMSFPQSAPHGVVFLHVTYVPAQEKNFTTAPAICHDGKAHFPREGVFVSNGTHWFVTQRNFYEPQIITTDNTFVSGNCDVVIGIVNNTVYDPLQPELDSFKEELDKYFKNHTSPDVDLGDISGINASVVNIQKEIDRLNEVAKNLNESLIDLQELGKYEQYIKWPWYIWLGFIAGLIAIVMVTIMLCCMTSCCSCLKGCCSCGSCCKFDEDDSEPVLKGVKLHYT

SEQ ID NO: 308 - protein, 1273 aa, Artificial Sequence
  source: /note="Description of Artificial Sequence: Synthetic polypeptide"
MFVFLVLLPLVSSQCVNLTTRTQLPPAYTNSFTRGVYYPDKVFRSSVLHSTQDLFLPFFSNVTWFHAIHVSGTNGTKRFDNPVLPFNDGVYFASTEKSNIIRGWIFGTTLDSKTQSLLIVNNATNVVIKVCEFQFCNDPFLGVYYHKNNKSWMESEFRVYSSANNCTFEYVSQPFLMDLEGKQGNFKNLREFVFKNIDGYFKIYSKHTPINLVRDLPQGFSALEPLVDLPIGINITRFQTLLALHRSYLTPGDSSSGWTAGAAAYYVGYLQPRTFLLKYNENGTITDAVDCALDPLSETKCTLKSFTVEKGIYQTSNFRVQPTESIVRFPNITNLCPFGEVFNATRFASVYAWNRKRISNCVADYSVLYNSASFSTFKCYGVSPTKLNDLCFTNVYADSFVIRGDEVRQIAPGQTGKIADYNYKLPDDFTGCVIAWNSNNLDSKVGGNYNYLYRLFRKSNLKPFERDISTEIYQAGSTPCNGVEGFNCYFPLQSYGFQPTNGVGYQPYRVVVLSFELLHAPATVCGPKKSTPLVKNKCVNFNFNGLTGTGVLTESNKKFLPFQQFGRDIADITDAVRDPQTLEILDITPCSFGGVSVITPGTNTSNQVAVLYQNVNCTEVPVAIHADQLTPTWRVYSTGSNVFQTRAGCLIGAEHVNNSYECDIPIGAGICASYQTQTNSPRRARSVASQSIIAYTMSLGAENSVAYSNNSIAIPTNFTISVTTEILPVSMTKTSVDCTMYICGDSTECSNLLLQYGSFCTQLNRALTGIAVEQDKNTQEVFAQVKQIYKTPPIKDFGGFNFSQILPDPSKPSKRSFIEDLLFNKVTLADAGFIKQYGDCLGDIAARDLICAQKFNGLTVLPPLLTDEMIAQYTSALLAGTITCGWTFGAGACLQIPFAMQMAYRFNGIGVTQNVLYENQKLIANQFNSAIGKIQDSLSSTASALGKLQDVVNQNAQALNTLVKQLSSNFGAISSVLNDILSRLDKVEAEVQIDRLITGRLQSLQTYVTQQLIRAAEIRASANLAATKMSECVLGQSKRVDFCGKGYHLMSFPQSAPHGVVFLHVTYVPAQEKNFTTAPAICHDGKAHFPREGVFVSNGTHWFVTQRNFYEPQIITTDNTFVSGNCDVVIGIVNNTVYDPLQPELDSFKEELDKYFKNHTSPDVDLGDISGINASVVNIQKEIDRLNEVAKNLNESLIDLQELGKYEQYIKWPWYIWLGFIAGLIAIVMVTIMLCCMTSCCSCLKGCCSCGSCCKFDEDDSEPVLKGVKLHYT

SEQ ID NO: 309 - protein, 1273 aa, Artificial Sequence
  source: /note="Description of Artificial Sequence: Synthetic polypeptide"
MFVFLVLLPLVSSQCVNLTTRTQLPPAYTNSFTRGVYYPDKVFRSSVLHSTQDLFLPFFSNVTWFHAIHVSGTNGTKRFDNPVLPFNDGVYFASTEKSNIIRGWIFGTTLDSKTQSLLIVNNATNVVIKVCEFQFCNDPFLGVYYHKNNKSWMESEFRVYSSANNCTFEYVSQPFLMDLEGKQGNFKNLREFVFKNIDGYFKIYSKHTPINLVRDLPQGFSALEPLVDLPIGINITRFQTLLALHRSYLTPGDSSSGWTAGAAAYYVGYLQPRTFLLKYNENGTITDAVDCALDPLSETKCTLKSFTVEKGIYQTSNFRVQPTESIVRFPNITNLCPFGEVFNATRFASVYAWNRKRISNCVADYSVLYNSASFSTFKCYGVSPTKLNDLCFTNVYADSFVIRGDEVRQIAPGQTGKIADYNYKLPDDFTGCVIAWNSNNLDSKVGGNYNYLYRLFRKSNLKPFERDISTEIYQAGSTPCNGVEGFNCYFPLQSYGFQPTNGVGYQPYRVVVLSFELLHAPATVCGPKKSTPLVKNKCVNFNFNGLTGTGVLTESNKKFLPFQQFGRDIADITDAVRDPQTLEILDITPCSFGGVSVITPGTNTSNQVAVLYQNVNCTEVPVAIHADQLTPTWRVYSTGSNVFQTRAGCLIGAEHVNNSYECDIPIGAGICASYQTQTNSPRRARSVASQSIIAYTMSLGAENSVAYSNNSIAIPTNFTISVTTEILPVSMTKTSVDCTMYICGDSTECSNLLLQYGSFCTQLNRALTGIAVEQDKNTQEVFAQVKQIYKTPPIKDFGGFNFSQILPDPSKPSKRSFIEDLLFNKVTLADAGFIKQYGDCLGDIAARDLICAQKFNGLTVLPPLLTDEMIAQYTSALLAGTITSGWTFGAGPALQIPFAMQMAYRFNGIGVTQNVLYENQKLIANQFNSAIGKIQDSLSSTPSALGKLQDVVNQNAQALNTLVKQLSSNFGAISSVLNDILSRLDKVEAEVQIDRLITGRLQSLQTYVTQQLIRAAEIRASANLAATKMSECVLGQSKRVDFCGKGYHLMSFPQSAPHGVVFLHVTYVPAQEKNFTTAPAICHDGKAHFPREGVFVSNGTHWFVTQRNFYEPQIITTDNTFVSGNCDVVIGIVNNTVYDPLQPELDSFKEELDKYFKNHTSPDVDLGDISGINASVVNIQKEIDRLNEVAKNLNESLIDLQELGKYEQYIKWPWYIWLGFIAGLIAIVMVTIMLCCMTSCCSCLKGCCSCGSCCKFDEDDSEPVLKGVKLHYT

SEQ ID NO: 310 - protein, 1273 aa, Artificial Sequence
  source: /note="Description of Artificial Sequence: Synthetic polypeptide"
MFVFLVLLPLVSSQCVNLTTRTQLPPAYTNSFTRGVYYPDKVFRSSVLHSTQDLFLPFFSNVTWFHAIHVSGTNGTKRFDNPVLPFNDGVYFASTEKSNIIRGWIFGTTLDSKTQSLLIVNNATNVVIKVCEFQFCNDPFLGVYYHKNNKSWMESEFRVYSSANNCTFEYVSQPFLMDLEGKQGNFKNLREFVFKNIDGYFKIYSKHTPINLVRDLPQGFSALEPLVDLPIGINITRFQTLLALHRSYLTPGDSSSGWTAGAAAYYVGYLQPRTFLLKYNENGTITDAVDCALDPLSETKCTLKSFTVEKGIYQTSNFRVQPTESIVRFPNITNLCPFGEVFNATRFASVYAWNRKRISNCVADYSVLYNSASFSTFKCYGVSPTKLNDLCFTNVYADSFVIRGDEVRQIAPGQTGKIADYNYKLPDDFTGCVIAWNSNNLDSKVGGNYNYLYRLFRKSNLKPFERDISTEIYQAGSTPCNGVEGFNCYFPLQSYGFQPTNGVGYQPYRVVVLSFELLHAPATVCGPKKSTNLVKNKCVNFNFNGLTGTGVLTESNKKFLPFQQFGRDIADITDAVRDPQTLEILDITPCSFGGVSVITPGTNTSNQVAVLYQNVNCTEVPVAIHADQLTPTWRVYSTGSNVFQTRAGCLIGAEHVNNSYECDIPIGAGICASYQTQTNSPRRARSVASQSIIAYTMSLGAENSVAYSNNSIAIPTNFTISVTTEILPVSMTKTSVDCTMYICGDSTECSNLLLQYGSFCTQLNRALTGIAVEQDKNTQEVFAQVKQIYKTPPIKDFGGFNFSQILPDPSKPSKRSFIEDLLFNKVTLADAGFIKQYGDCLGDIAARDLICAQKFNGLTVLPPLLTDEMIAQYTSALLACTITSGWTCGAGPALQIPFAMQMAYRFNGIGVTQNVLYENQKLIANQFNSAIGKIQDSLSSTPSALGKLQDVVNQNAQALNTLVKQLSSNFGAISSVLNDILSRLDKVEAEVQIDRLITGRLQSLQTYVTQQLIRAAEIRASANLAATKMSECVLGQSKRVDFCGKGYHLMSFPQSAPHGVVFLHVTYVPAQEKNFTTAPAICHDGKAHFPREGVFVSNGTHWFVTQRNFYEPQIITTDNTFVSGNCDVVIGIVNNTVYDPLQPELDSFKEELDKYFKNHTSPDVDLGDISGINASVVNIQKEIDRLNEVAKNLNESLIDLQELGKYEQYIKWPWYIWLGFIAGLIAIVMVTIMLCCMTSCCSCLKGCCSCGSCCKFDEDDSEPVLKGVKLHYT

SEQ ID NO: 311 - protein, 1273 aa, Artificial Sequence
  source: /note="Description of Artificial Sequence: Synthetic polypeptide"
MFVFLVLLPLVSSQCVNLTTRTQLPPAYTNSFTRGVYYPDKVFRSSVLHSTQDLFLPFFSNVTWFHAIHVSGTNGTKRFDNPVLPFNDGVYFASTEKSNIIRGWIFGTTLDSKTQSLLIVNNATNVVIKVCEFQFCNDPFLGVYYHKNNKSWMESEFRVYSSANNCTFEYVSQPFLMDLEGKQGNFKNLREFVFKNIDGYFKIYSKHTPINLVRDLPQGFSALEPLVDLPIGINITRFQTLLALHRSYLTPGDSSSGWTAGAAAYYVGYLQPRTFLLKYNENGTITDAVDCALDPLSETKCTLKSFTVEKGIYQTSNFRVQPTESIVRFPNITNLCPFGEVFNATRFASVYAWNRKRISNCVADYSVLYNSASFSTFKCYGVSPTKLNDLCFTNVYADSFVIRGDEVRQIAPGQTGKIADYNYKLPDDFTGCVIAWNSNNLDSKVGGNYNYLYRLFRKSNLKPFERDISTEIYQAGSTPCNGVEGFNCYFPLQSYGFQPTNGVGYQPYRVVVLSFELLHAPATVCGPKKSTNLVKNKCVNFNFNGLTGTGVLTESNKKFLPFQQFGRDIADITDAVRDPQTLEILDITPCSFGGVSVITPGTNTSNQVAVLYQNVNCTEVPVAIHADQLTPTWRVYSTGSNVFQTRAGCLIGAEHVNNSYECDIPIGAGICASYQTQTNSPRRARSVASQSIIAYTMSLGAENSVAYSNNSIAIPTNFTISVTTEILPVSMTKTSVDCTMYICGDSTECSNLLLQYGSFCTQLNRALTGIAVEQDKNTQEVFAQVKQIYKTPPIKDFGGFNFSQILPDPSKPSKRSFIEDLLFNKVTLADAGFIKQYGDCLGDIAARDLICAQKFNGLTVLPPLLTDEMIAQYTSALLAGTITCGWTFGAGPCLQIPFAMQMAYRFNGIGVTQNVLYENQKLIANQFNSAIGKIQDSLSSTPSALGKLQDVVNQNAQALNTLVKQLSSNFGAISSVLNDILSRLDKVEAEVQIDRLITGRLQSLQTYVTQQLIRAAEIRASANLAATKMSECVLGQSKRVDFCGKGYHLMSFPQSAPHGVVFLHVTYVPAQEKNFTTAPAICHDGKAHFPREGVFVSNGTHWFVTQRNFYEPQIITTDNTFVSGNCDVVIGIVNNTVYDPLQPELDSFKEELDKYFKNHTSPDVDLGDISGINASVVNIQKEIDRLNEVAKNLNESLIDLQELGKYEQYIKWPWYIWLGFIAGLIAIVMVTIMLCCMTSCCSCLKGCCSCGSCCKFDEDDSEPVLKGVKLHYT

SEQ ID NO: 312 - protein, 1273 aa, Artificial Sequence
  source: /note="Description of Artificial Sequence: Synthetic polypeptide"
MFVFLVLLPLVSSQCVNLTTRTQLPPAYTNSFTRGVYYPDKVFRSSVLHSTQDLFLPFFSNVTWFHAIHVSGTNGTKRFDNPVLPFNDGVYFASTEKSNIIRGWIFGTTLDSKTQSLLIVNNATNVVIKVCEFQFCNDPFLGVYYHKNNKSWMESEFRVYSSANNCTFEYVSQPFLMDLEGKQGNFKNLREFVFKNIDGYFKIYSKHTPINLVRDLPQGFSALEPLVDLPIGINITRFQTLLALHRSYLTPGDSSSGWTAGAAAYYVGYLQPRTFLLKYNENGTITDAVDCALDPLSETKCTLKSFTVEKGIYQTSNFRVQPTESIVRFPNITNLCPFGEVFNATRFASVYAWNRKRISNCVADYSVLYNSASFSTFKCYGVSPTKLNDLCFTNVYADSFVIRGDEVRQIAPGQTGKIADYNYKLPDDFTGCVIAWNSNNLDSKVGGNYNYLYRLFRKSNLKPFERDISTEIYQAGSTPCNGVEGFNCYFPLQSYGFQPTNGVGYQPYRVVVLSFELLHAPATVCGPKKSTPLVKNKCVNFNFNGLTGTGVLTESNKKFLPFQQFGRDIADTTDAVRDPQTLEILDITPCSFGGVSVITPGTNTSNQVAVLYQNVNCTEVPVAIHADQLTPTWRVYSTGSNVFQTRAGCLIGAEHVNNSYECDIPIGAGICASYQTQTNSPRRARSVASQSIIAYTMSLGAENSVAYSNNSIAIPTNFTISVTTEILPVSMTKTSVDCTMYICGDSTECSNLLLQYGSFCTQLNRALTGIAVEQDKNTQEVFAQVKQIYKTPPIKDFGGFNFSQILPDPSKPSKRSFIEDLLFNKVTLADAGFIKQYGDCLGDIAARDLICAQKFNGLTVLPPLLTDEMIAQYTSALLACTITSGWTCGAGPALQIPFAMQMAYRFNGIGVTQNVLYENQKLIANQFNSAIGKIQDSLSSTPSALGKLQDVVNQNAQALNTLVKQLSSNFGAISSVLNDILSRLDKVEAEVQIDRLITGRLQSLQTYVTQQLIRAAEIRASANLAATKMSECVLGQSKRVDFCGKGYHLMSFPQSAPHGVVFLHVTYVPAQEKNFTTAPAICHDGKAHFPREGVFVSNGTHWFVTQRNFYEPQIITTDNTFVSGNCDVVIGIVNNTVYDPLQPELDSFKEELDKYFKNHTSPDVDLGDISGINASVVNIQKEIDRLNEVAKNLNESLIDLQELGKYEQYIKWPWYIWLGFIAGLIAIVMVTIMLCCMTSCCSCLKGCCSCGSCCKFDEDDSEPVLKGVKLHYT

SEQ ID NO: 313 - protein, 1273 aa, Artificial Sequence
  source: /note="Description of Artificial Sequence: Synthetic polypeptide"
MFVFLVLLPLVSSQCVNLTTRTQLPPAYTNSFTRGVYYPDKVFRSSVLHSTQDLFLPFFSNVTWFHAIHVSGTNGTKRFDNPVLPFNDGVYFASTEKSNIIRGWIFGTTLDSKTQSLLIVNNATNVVIKVCEFQFCNDPFLGVYYHKNNKSWMESEFRVYSSANNCTFEYVSQPFLMDLEGKQGNFKNLREFVFKNIDGYFKIYSKHTPINLVRDLPQGFSALEPLVDLPIGINITRFQTLLALHRSYLTPGDSSSGWTAGAAAYYVGYLQPRTFLLKYNENGTITDAVDCALDPLSETKCTLKSFTVEKGIYQTSNFRVQPTESIVRFPNITNLCPFGEVFNATRFASVYAWNRKRISNCVADYSVLYNSASFSTFKCYGVSPTKLNDLCFTNVYADSFVIRGDEVRQIAPGQTGKIADYNYKLPDDFTGCVIAWNSNNLDSKVGGNYNYLYRLFRKSNLKPFERDISTEIYQAGSTPCNGVEGFNCYFPLQSYGFQPTNGVGYQPYRVVVLSFELLHAPATVCGPKKSTPLVKNKCVNFNFNGLTGTGVLTESNKKFLPFQQFGRDIADTTDAVRDPQTLEILDITPCSFGGVSVITPGTNTSNQVAVLYQNVNCTEVPVAIHADQLTPTWRVYSTGSNVFQTRAGCLIGAEHVNNSYECDIPIGAGICASYQTQTNSPRRARSVASQSIIAYTMSLGAENSVAYSNNSIAIPTNFTISVTTEILPVSMTKTSVDCTMYICGDSTECSNLLLQYGSFCTQLNRALTGIAVEQDKNTQEVFAQVKQIYKTPPIKDFGGFNFSQILPDPSKPSKRSFIEDLLFNKVTLADAGFIKQYGDCLGDIAARDLICAQKFNGLTVLPPLLTDEMIAQYTSALLAGTITCGWTFGAGPCLQIPFAMQMAYRFNGIGVTQNVLYENQKLIANQFNSAIGKIQDSLSSTPSALGKLQDVVNQNAQALNTLVKQLSSNFGAISSVLNDILSRLDKVEAEVQIDRLITGRLQSLQTYVTQQLIRAAEIRASANLAATKMSECVLGQSKRVDFCGKGYHLMSFPQSAPHGVVFLHVTYVPAQEKNFTTAPAICHDGKAHFPREGVFVSNGTHWFVTQRNFYEPQIITTDNTFVSGNCDVVIGIVNNTVYDPLQPELDSFKEELDKYFKNHTSPDVDLGDISGINASVVNIQKEIDRLNEVAKNLNESLIDLQELGKYEQYIKWPWYIWLGFIAGLIAIVMVTIMLCCMTSCCSCLKGCCSCGSCCKFDEDDSEPVLKGVKLHYT

SEQ ID NO: 314 - protein, 1273 aa, Artificial Sequence
  source: /note="Description of Artificial Sequence: Synthetic polypeptide"
MFVFLVLLPLVSSQCVNLTTRTQLPPAYTNSFTRGVYYPDKVFRSSVLHSTQDLFLPFFSNVTWFHAIHVSGTNGTKRFDNPVLPFNDGVYFASTEKSNIIRGWIFGTTLDSKTQSLLIVNNATNVVIKVCEFQFCNDPFLGVYYHKNNKSWMESEFRVYSSANNCTFEYVSQPFLMDLEGKQGNFKNLREFVFKNIDGYFKIYSKHTPINLVRDLPQGFSALEPLVDLPIGINITRFQTLLALHRSYLTPGDSSSGWTAGAAAYYVGYLQPRTFLLKYNENGTITDAVDCALDPLSETKCTLKSFTVEKGIYQTSNFRVQPTESIVRFPNITNLCPFGEVFNATRFASVYAWNRKRISNCVADYSVLYNSASFSTFKCYGVSPTKLNDLCFTNVYADSFVIRGDEVRQIAPGQTGKIADYNYKLPDDFTGCVIAWNSNNLDSKVGGNYNYLYRLFRKSNLKPFERDISTEIYQAGSTPCNGVEGFNCYFPLQSYGFQPTNGVGYQPYRVVVLSFELLHAPATVCGPKKSTPLVKNKCVNFNFNGLTGTGVLTESNKKFLPFQQFGRDIADITDAVRDPQTLEILDITPCSFGGVSVITPGTNTSNQVAVLYQDVNCTEVPVAIHADQLTPTWRVYSTGSNVFQTRAGCLIGAEHVNNSYECDIPIGAGICASYQTQTNSPRRARSVASQSIIAYTMSLGAENSVAYSNNSIAIPTNFTISVTTEILPVSMTKTSVDCTMYICGDSTECSNLLLQYGSFCTQLNRALTGIAVEQDKNTQEVFAQVKQIYKTPPIKDFGGFNFSQILPDPSKPSKRSFIEDLLFNKVTLADAGFIKQYGDCLGDIAARDLICAQKFNGLTVLPPLLTDEMIAQYTSALLACTITSGWTCGAGPALQIPFAMQMAYRFNGIGVTQNVLYENQKLIANQFNSAIGKIQDSLSSTPSALGKLQDVVNQNAQALNTLVKQLSSNFGAISSVLNDILSRLDKVEAEVQIDRLITGRLQSLQTYVTQQLIRAAEIRASANLAATKMSECVLGQSKRVDFCGKGYHLMSFPQSAPHGVVFLHVTYVPAQEKNFTTAPAICHDGKAHFPREGVFVSNGTHWFVTQRNFYEPQIITTDNTFVSGNCDVVIGIVNNTVYDPLQPELDSFKEELDKYFKNHTSPDVDLGDISGINASVVNIQKEIDRLNEVAKNLNESLIDLQELGKYEQYIKWPWYIWLGFIAGLIAIVMVTIMLCCMTSCCSCLKGCCSCGSCCKFDEDDSEPVLKGVKLHYT

SEQ ID NO: 315 - protein, 1273 aa, Artificial Sequence
  source: /note="Description of Artificial Sequence: Synthetic polypeptide"
MFVFLVLLPLVSSQCVNLTTRTQLPPAYTNSFTRGVYYPDKVFRSSVLHSTQDLFLPFFSNVTWFHAIHVSGTNGTKRFDNPVLPFNDGVYFASTEKSNIIRGWIFGTTLDSKTQSLLIVNNATNVVIKVCEFQFCNDPFLGVYYHKNNKSWMESEFRVYSSANNCTFEYVSQPFLMDLEGKQGNFKNLREFVFKNIDGYFKIYSKHTPINLVRDLPQGFSALEPLVDLPIGINITRFQTLLALHRSYLTPGDSSSGWTAGAAAYYVGYLQPRTFLLKYNENGTITDAVDCALDPLSETKCTLKSFTVEKGIYQTSNFRVQPTESIVRFPNITNLCPFGEVFNATRFASVYAWNRKRISNCVADYSVLYNSASFSTFKCYGVSPTKLNDLCFTNVYADSFVIRGDEVRQIAPGQTGKIADYNYKLPDDFTGCVIAWNSNNLDSKVGGNYNYLYRLFRKSNLKPFERDISTEIYQAGSTPCNGVEGFNCYFPLQSYGFQPTNGVGYQPYRVVVLSFELLHAPATVCGPKKSTPLVKNKCVNFNFNGLTGTGVLTESNKKFLPFQQFGRDIADITDAVRDPQTLEILDITPCSFGGVSVITPGTNTSNQVAVLYQDVNCTEVPVAIHADQLTPTWRVYSTGSNVFQTRAGCLIGAEHVNNSYECDIPIGAGICASYQTQTNSPRRARSVASQSIIAYTMSLGAENSVAYSNNSIAIPTNFTISVTTEILPVSMTKTSVDCTMYICGDSTECSNLLLQYGSFCTQLNRALTGIAVEQDKNTQEVFAQVKQIYKTPPIKDFGGFNFSQILPDPSKPSKRSFIEDLLFNKVTLADAGFIKQYGDCLGDIAARDLICAQKFNGLTVLPPLLTDEMIAQYTSALLAGTITCGWTFGAGPCLQIPFAMQMAYRFNGIGVTQNVLYENQKLIANQFNSAIGKIQDSLSSTPSALGKLQDVVNQNAQALNTLVKQLSSNFGAISSVLNDILSRLDKVEAEVQIDRLITGRLQSLQTYVTQQLIRAAEIRASANLAATKMSECVLGQSKRVDFCGKGYHLMSFPQSAPHGVVFLHVTYVPAQEKNFTTAPAICHDGKAHFPREGVFVSNGTHWFVTQRNFYEPQIITTDNTFVSGNCDVVIGIVNNTVYDPLQPELDSFKEELDKYFKNHTSPDVDLGDISGINASVVNIQKEIDRLNEVAKNLNESLIDLQELGKYEQYIKWPWYIWLGFIAGLIAIVMVTIMLCCMTSCCSCLKGCCSCGSCCKFDEDDSEPVLKGVKLHYT

SEQ ID NO: 316 - protein, 1273 aa, Artificial Sequence
  source: /note="Description of Artificial Sequence: Synthetic polypeptide"
MFVFLVLLPLVSSQCVNLTTRTQLPPAYTNSFTRGVYYPDKVFRSSVLHSTQDLFLPFFSNVTWFHAIHVSGTNGTKRFDNPVLPFNDGVYFASTEKSNIIRGWIFGTTLDSKTQSLLIVNNATNVVIKVCEFQFCNDPFLGVYYHKNNKSWMESEFRVYSSANNCTFEYVSQPFLMDLEGKQGNFKNLREFVFKNIDGYFKIYSKHTPINLVRDLPQGFSALEPLVDLPIGINITRFQTLLALHRSYLTPGDSSSGWTAGAAAYYVGYLQPRTFLLKYNENGTITDAVDCALDPLSETKCTLKSFTVEKGIYQTSNFRVQPTESIVRFPNITNLCPFGEVFNATRFASVYAWNRKRISNCVADYSVLYNSASFSTFKCYGVSPTKLNDLCFTNVYADSFVIRGDEVRQIAPGQTGKIADYNYKLPDDFTGCVIAWNSNNLDSKVGGNYNYLYRLFRKSNLKPFERDISTEIYQAGSTPCNGVEGFNCYFPLQSYGFQPTNGVGYQPYRVVVLSFELLHAPATVCGPKKSTPLVKNKCVNFNFNGLTGTGVLTESNKKFLPFQQFGRDIADITDAVRDPQTLEILDITPCSFGGVSVITPGTNTSNQVAVLYQNVNCTEVPVAIHADQLTPTWRVYSTGSNVFQTRAGCLIGAEHVNNSYECDIPIGAGICASYQTQTNSPRRARSVASQSIIAYTMSLGAENSVAYSNNSIAIPTNFTISVTTEILPVSMTKTSVDCTMYICGDSTECSNLLLQYGSFCTQLNRALTGIAVEQDKNTQEVFAQVKQIYKTPPIKDFGGFNFSQILPDPSKPSKRSFIEDLLFNKVTLADAGFIKQYGDCLGDIAARDLICAQKFNGLTVLPPLLTDEMIAQYTSALLACTITSGWTCGAGAALQIPFAMQMAYRFNGIGVTQNVLYENQKLIANQFNSAIGKIQDSLSSTPSALGKLQDVVNQNAQALNTLVKQLSSNFGAISSVLNDILSRLDKVEAEVQIDRLITGRLQSLQTYVTQQLIRAAEIRASANLAATKMSECVLGQSKRVDFCGKGYHLMSFPQSAPHGVVFLHVTYVPAQEKNFTTAPAICHDGKAHFPREGVFVSNGTHWFVTQRNFYEPQIITTDNTFVSGNCDVVIGIVNNTVYDPLQPELDSFKEELDKYFKNHTSPDVDLGDISGINASVVNIQKEIDRLNEVAKNLNESLIDLQELGKYEQYIKWPWYIWLGFIAGLIAIVMVTIMLCCMTSCCSCLKGCCSCGSCCKFDEDDSEPVLKGVKLHYT

SEQ ID NO: 317 - protein, 1273 aa, Artificial Sequence
  source: /note="Description of Artificial Sequence: Synthetic polypeptide"
MFVFLVLLPLVSSQCVNLTTRTQLPPAYTNSFTRGVYYPDKVFRSSVLHSTQDLFLPFFSNVTWFHAIHVSGTNGTKRFDNPVLPFNDGVYFASTEKSNIIRGWIFGTTLDSKTQSLLIVNNATNVVIKVCEFQFCNDPFLGVYYHKNNKSWMESEFRVYSSANNCTFEYVSQPFLMDLEGKQGNFKNLREFVFKNIDGYFKIYSKHTPINLVRDLPQGFSALEPLVDLPIGINITRFQTLLALHRSYLTPGDSSSGWTAGAAAYYVGYLQPRTFLLKYNENGTITDAVDCALDPLSETKCTLKSFTVEKGIYQTSNFRVQPTESIVRFPNITNLCPFGEVFNATRFASVYAWNRKRISNCVADYSVLYNSASFSTFKCYGVSPTKLNDLCFTNVYADSFVIRGDEVRQIAPGQTGKIADYNYKLPDDFTGCVIAWNSNNLDSKVGGNYNYLYRLFRKSNLKPFERDISTEIYQAGSTPCNGVEGFNCYFPLQSYGFQPTNGVGYQPYRVVVLSFELLHAPATVCGPKKSTPLVKNKCVNFNFNGLTGTGVLTESNKKFLPFQQFGRDIADITDAVRDPQTLEILDITPCSFGGVSVITPGTNTSNQVAVLYQNVNCTEVPVAIHADQLTPTWRVYSTGSNVFQTRAGCLIGAEHVNNSYECDIPIGAGICASYQTQTNSPRRARSVASQSIIAYTMSLGAENSVAYSNNSIAIPTNFTISVTTEILPVSMTKTSVDCTMYICGDSTECSNLLLQYGSFCTQLNRALTGIAVEQDKNTQEVFAQVKQIYKTPPIKDFGGFNFSQILPDPSKPSKRSFIEDLLFNKVTLADAGFIKQYGDCLGDIAARDLICAQKFNGLTVLPPLLTDEMIAQYTSALLAGTITCGWTFGAGACLQIPFAMQMAYRFNGIGVTQNVLYENQKLIANQFNSAIGKIQDSLSSTPSALGKLQDVVNQNAQALNTLVKQLSSNFGAISSVLNDILSRLDKVEAEVQIDRLITGRLQSLQTYVTQQLIRAAEIRASANLAATKMSECVLGQSKRVDFCGKGYHLMSFPQSAPHGVVFLHVTYVPAQEKNFTTAPAICHDGKAHFPREGVFVSNGTHWFVTQRNFYEPQIITTDNTFVSGNCDVVIGIVNNTVYDPLQPELDSFKEELDKYFKNHTSPDVDLGDISGINASVVNIQKEIDRLNEVAKNLNESLIDLQELGKYEQYIKWPWYIWLGFIAGLIAIVMVTIMLCCMTSCCSCLKGCCSCGSCCKFDEDDSEPVLKGVKLHYT

SEQ ID NO: 318 - protein, 1273 aa, Artificial Sequence
  source: /note="Description of Artificial Sequence: Synthetic polypeptide"
MFVFLVLLPLVSSQCVNLTTRTQLPPAYTNSFTRGVYYPDKVFRSSVLHSTQDLFLPFFSNVTWFHAIHVSGTNGTKRFDNPVLPFNDGVYFASTEKSNIIRGWIFGTTLDSKTQSLLIVNNATNVVIKVCEFQFCNDPFLGVYYHKNNKSWMESEFRVYSSANNCTFEYVSQPFLMDLEGKQGNFKNLREFVFKNIDGYFKIYSKHTPINLVRDLPQGFSALEPLVDLPIGINITRFQTLLALHRSYLTPGDSSSGWTAGAAAYYVGYLQPRTFLLKYNENGTITDAVDCALDPLSETKCTLKSFTVEKGIYQTSNFRVQPTESIVRFPNITNLCPFGEVFNATRFASVYAWNRKRISNCVADYSVLYNSASFSTFKCYGVSPTKLNDLCFTNVYADSFVIRGDEVRQIAPGQTGKIADYNYKLPDDFTGCVIAWNSNNLDSKVGGNYNYLYRLFRKSNLKPFERDISTEIYQAGSTPCNGVEGFNCYFPLQSYGFQPTNGVGYQPYRVVVLSFELLHAPATVCGPKKSTPLVKNKCVNFNFNGLTGTGVLTESNKKFLPFQQFGRDIADITDAVRDPQTLEILDITPCSFGGVSVITPGTNTSNQVAVLYQNVNCTEVPVAIHADQLTPTWRVYSTGSNVFQTRAGCLIGAEHVNNSYECDIPIGAGICASYQTQTNSPRRARSVASQSIIAYTMSLGAENSVAYSNNSIAIPTNFTISVTTEILPVSMTKTSVDCTMYICGDSTECSNLLLQYGSFCTQLNRALTGIAVEQDKNTQEVFAQVKQIYKTPPIKDFGGFNFSQILPDPSKPSKRSFIEDLLFNKVTLADAGFIKQYGDCLGDIAARDLICAQKFNGLTVLPPLLTDEMIAQYTSALLACTITSGWTCGAGPALQIPFAMQMAYRFNGIGVTQNVLYENQKLIANQFNSAIGKIQDSLSSTASALGKLQDVVNQNAQALNTLVKQLSSNFGAISSVLNDILSRLDKVEAEVQIDRLITGRLQSLQTYVTQQLIRAAEIRASANLAATKMSECVLGQSKRVDFCGKGYHLMSFPQSAPHGVVFLHVTYVPAQEKNFTTAPAICHDGKAHFPREGVFVSNGTHWFVTQRNFYEPQIITTDNTFVSGNCDVVIGIVNNTVYDPLQPELDSFKEELDKYFKNHTSPDVDLGDISGINASVVNIQKEIDRLNEVAKNLNESLIDLQELGKYEQYIKWPWYIWLGFIAGLIAIVMVTIMLCCMTSCCSCLKGCCSCGSCCKFDEDDSEPVLKGVKLHYT

SEQ ID NO: 319 - protein, 1273 aa, Artificial Sequence
  source: /note="Description of Artificial Sequence: Synthetic polypeptide"
MFVFLVLLPLVSSQCVNLTTRTQLPPAYTNSFTRGVYYPDKVFRSSVLHSTQDLFLPFFSNVTWFHAIHVSGTNGTKRFDNPVLPFNDGVYFASTEKSNIIRGWIFGTTLDSKTQSLLIVNNATNVVIKVCEFQFCNDPFLGVYYHKNNKSWMESEFRVYSSANNCTFEYVSQPFLMDLEGKQGNFKNLREFVFKNIDGYFKIYSKHTPINLVRDLPQGFSALEPLVDLPIGINITRFQTLLALHRSYLTPGDSSSGWTAGAAAYYVGYLQPRTFLLKYNENGTITDAVDCALDPLSETKCTLKSFTVEKGIYQTSNFRVQPTESIVRFPNITNLCPFGEVFNATRFASVYAWNRKRISNCVADYSVLYNSASFSTFKCYGVSPTKLNDLCFTNVYADSFVIRGDEVRQIAPGQTGKIADYNYKLPDDFTGCVIAWNSNNLDSKVGGNYNYLYRLFRKSNLKPFERDISTEIYQAGSTPCNGVEGFNCYFPLQSYGFQPTNGVGYQPYRVVVLSFELLHAPATVCGPKKSTPLVKNKCVNFNFNGLTGTGVLTESNKKFLPFQQFGRDIADITDAVRDPQTLEILDITPCSFGGVSVITPGTNTSNQVAVLYQNVNCTEVPVAIHADQLTPTWRVYSTGSNVFQTRAGCLIGAEHVNNSYECDIPIGAGICASYQTQTNSPRRARSVASQSIIAYTMSLGAENSVAYSNNSIAIPTNFTISVTTEILPVSMTKTSVDCTMYICGDSTECSNLLLQYGSFCTQLNRALTGIAVEQDKNTQEVFAQVKQIYKTPPIKDFGGFNFSQILPDPSKPSKRSFIEDLLFNKVTLADAGFIKQYGDCLGDIAARDLICAQKFNGLTVLPPLLTDEMIAQYTSALLAGTITCGWTFGAGPCLQIPFAMQMAYRFNGIGVTQNVLYENQKLIANQFNSAIGKIQDSLSSTASALGKLQDVVNQNAQALNTLVKQLSSNFGAISSVLNDILSRLDKVEAEVQIDRLITGRLQSLQTYVTQQLIRAAEIRASANLAATKMSECVLGQSKRVDFCGKGYHLMSFPQSAPHGVVFLHVTYVPAQEKNFTTAPAICHDGKAHFPREGVFVSNGTHWFVTQRNFYEPQIITTDNTFVSGNCDVVIGIVNNTVYDPLQPELDSFKEELDKYFKNHTSPDVDLGDISGINASVVNIQKEIDRLNEVAKNLNESLIDLQELGKYEQYIKWPWYIWLGFIAGLIAIVMVTIMLCCMTSCCSCLKGCCSCGSCCKFDEDDSEPVLKGVKLHYT

SEQ ID NO: 320 - protein, 1273 aa, Artificial Sequence
  source: /note="Description of Artificial Sequence: Synthetic polypeptide"
MFVFLVLLPLVSSQCVNLTTRTQLPPAYTNSFTRGVYYPDKVFRSSVLHSTQDLFLPFFSNVTWFHAIHVSGTNGTKRFDNPVLPFNDGVYFASTEKSNIIRGWIFGTTLDSKTQSLLIVNNATNVVIKVCEFQFCNDPFLGVYYHKNNKSWMESEFRVYSSANNCTFEYVSQPFLMDLEGKQGNFKNLREFVFKNIDGYFKIYSKHTPINLVRDLPQGFSALEPLVDLPIGINITRFQTLLALHRSYLTPGDSSSGWTAGAAAYYVGYLQPRTFLLKYNENGTITDAVDCALDPLSETKCTLKSFTVEKGIYQTSNFRVQPTESIVRFPNITNLCPFGEVFNATRFASVYAWNRKRISNCVADYSVLYNSASFSTFKCYGVSPTKLNDLCFTNVYADSFVIRGDEVRQIAPGQTGKIADYNYKLPDDFTGCVIAWNSNNLDSKVGGNYNYLYRLFRKSNLKPFERDISTEIYQAGSTPCNGVEGFNCYFPLQSYGFQPTNGVGYQPYRVVVLSFELLHAPATVCGPKKSTPLVKNKCVNFNFNGLTGTGVLTESNKKFLPFQQFGRDIADITDAVRDPQTLEILDITPCSFGGVSVITPGTNTSNQVAVLYQNVNCTEVPVAIHADQLTPTWRVYSTGSNVFQTRAGCLIGAEHVNNSYECDIPIGAGICASYQTQTNSPRRARSVASQSIIAYTMSLGAENSVAYSNNSIAIPTNFTISVTTEILPVSMTKTSVDCTMYICGDSTECSNLLLQYGSFCTQLNRALTGIAVEQDKNTQEVFAQVKQIYKTPPIKDFGGFNFSQILPDPSKPSKRSFIEDLLFNKVTLADAGFIKQYGDCLGDIAARDLICAQKFNGLTVLPPLLTDEMIAQYTSALLACTITSGWTCGAGPALQIPFAMQMAYRFNGIGVTQNVLYENQKLIANQFNSAIGKIQDSLSSTPSALGKLQDVVNQNAQALNTLVKQLSSNFGAISSVLNDILSRLDKVEAEVQIDRLITGRLQSLQTYVTQQLIRAAEIRASANLAATKMSECVLGQSKRVDFCGKGYHLMSFPQSAPHGVVFLHVTYVPAQEKNFTTAPAICHDGKAHFPREGVFVSNGTHWFVTQRNFYEPQIITTDNTFVSGNCDVVIGIVNNTVYDPLQPELDSFKEELDKYFKNHTSPDVDLGDISGINASVVNIQKEIDRLNEVAKNLNESLIDLQELGKYEQYIKWPWYIWLGFIAGLIAIVMVTIMLCCMTSCCSCLKGCCSCGSCCKFDEDDSEPVLKGVKLHYT

SEQ ID NO: 321 - protein, 1273 aa, Artificial Sequence
  source: /note="Description of Artificial Sequence: Synthetic polypeptide"
MFVFLVLLPLVSSQCVNLTTRTQLPPAYTNSFTRGVYYPDKVFRSSVLHSTQDLFLPFFSNVTWFHAIHVSGTNGTKRFDNPVLPFNDGVYFASTEKSNIIRGWIFGTTLDSKTQSLLIVNNATNVVIKVCEFQFCNDPFLGVYYHKNNKSWMESEFRVYSSANNCTFEYVSQPFLMDLEGKQGNFKNLREFVFKNIDGYFKIYSKHTPINLVRDLPQGFSALEPLVDLPIGINITRFQTLLALHRSYLTPGDSSSGWTAGAAAYYVGYLQPRTFLLKYNENGTITDAVDCALDPLSETKCTLKSFTVEKGIYQTSNFRVQPTESIVRFPNITNLCPFGEVFNATRFASVYAWNRKRISNCVADYSVLYNSASFSTFKCYGVSPTKLNDLCFTNVYADSFVIRGDEVRQIAPGQTGKIADYNYKLPDDFTGCVIAWNSNNLDSKVGGNYNYLYRLFRKSNLKPFERDISTEIYQAGSTPCNGVEGFNCYFPLQSYGFQPTNGVGYQPYRVVVLSFELLHAPATVCGPKKSTPLVKNKCVNFNFNGLTGTGVLTESNKKFLPFQQFGRDIADITDAVRDPQTLEILDITPCSFGGVSVITPGTNTSNQVAVLYQNVNCTEVPVAIHADQLTPTWRVYSTGSNVFQTRAGCLIGAEHVNNSYECDIPIGAGICASYQTQTNSPRRARSVASQSIIAYTMSLGAENSVAYSNNSIAIPTNFTISVTTEILPVSMTKTSVDCTMYICGDSTECSNLLLQYGSFCTQLNRALTGIAVEQDKNTQEVFAQVKQIYKTPPIKDFGGFNFSQILPDPSKPSKRSFIEDLLFNKVTLADAGFIKQYGDCLGDIAARDLICAQKFNGLTVLPPLLTDEMIAQYTSALLAGTITCGWTFGAGPCLQIPFAMQMAYRFNGIGVTQNVLYENQKLIANQFNSAIGKIQDSLSSTPSALGKLQDVVNQNAQALNTLVKQLSSNFGAISSVLNDILSRLDKVEAEVQIDRLITGRLQSLQTYVTQQLIRAAEIRASANLAATKMSECVLGQSKRVDFCGKGYHLMSFPQSAPHGVVFLHVTYVPAQEKNFTTAPAICHDGKAHFPREGVFVSNGTHWFVTQRNFYEPQIITTDNTFVSGNCDVVIGIVNNTVYDPLQPELDSFKEELDKYFKNHTSPDVDLGDISGINASVVNIQKEIDRLNEVAKNLNESLIDLQELGKYEQYIKWPWYIWLGFIAGLIAIVMVTIMLCCMTSCCSCLKGCCSCGSCCKFDEDDSEPVLKGVKLHYT

SEQ ID NO: 322 - protein, 1273 aa, Artificial Sequence
  source: /note="Description of Artificial Sequence: Synthetic polypeptide"
MFVFLVLLPLVSSQCVNLTTRTQLPPAYTNSFTRGVYYPDKVFRSSVLHSTQDLFLPFFSNVTWFHAIHVSGTNGTKRFDNPVLPFNDGVYFASTEKSNIIRGWIFGTTLDSKTQSLLIVNNATNVVIKVCEFQFCNDPFLGVYYHKNNKSWMESEFRVYSSANNCTFEYVSQPFLMDLEGKQGNFKNLREFVFKNIDGYFKIYSKHTPINLVRDLPQGFSALEPLVDLPIGINITRFQTLLALHRSYLTPGDSSSGWTAGAAAYYVGYLQPRTFLLKYNENGTITDAVDCALDPLSETKCTLKSFTVEKGIYQTSNFRVQPTESIVRFPNITNLCPFGEVFNATRFASVYAWNRKRISNCVADYSVLYNSASFSTFKCYGVSPTKLNDLCFTNVYADSFVIRGDEVRQIAPGQTGKIADYNYKLPDDFTGCVIAWNSNNLDSKVGGNYNYLYRLFRKSNLKPFERDISTEIYQAGSTPCNGVEGFNCYFPLQSYGFQPTNGVGYQPYRVVVLSFELLHAPATVCGPKKSTNLVKNKCVNFNFNGLTGTGVLTESNKKFLPFQQFGRDIADTTDAVRDPQTLEILDITPCSFGGVSVITPGTNTSNQVAVLYQDVNCTEVPVAIHADQLTPTWRVYSTGSNVFQTRAGCLIGAEHVNNSYECDIPIGAGICASYQTQTNSPRRARSVASQSIIAYTMSLGAENSVAYSNNSIAIPTNFTISVTTEILPVSMTKTSVDCTMYICGDSTECSNLLLQYGSFCTQLNRALTGIAVEQDKNTQEVFAQVKQIYKTPPIKDFGGFNFSQILPDPSKPSKRSFIEDLLFNKVTLADAGFIKQYGDCLGDIAARDLICAQKFNGLTVLPPLLTDEMIAQYTSALLAGTITSGWTFGAGAALQIPFAMQMAYRFNGIGVTQNVLYENQKLIANQFNSAIGKIQDSLSSTPSALGKLQDVVNQNAQALNTLVKQLSSNFGAISSVLNDILSRLDPPEAEVQIDRLITGRLQSLQTYVTQQLIRAAEIRASANLAATKMSECVLGQSKRVDFCGKGYHLMSFPQSAPHGVVFLHVTYVPAQEKNFTTAPAICHDGKAHFPREGVFVSNGTHWFVTQRNFYEPQIITTDNTFVSGNCDVVIGIVNNTVYDPLQPELDSFKEELDKYFKNHTSPDVDLGDISGINASVVNIQKEIDRLNEVAKNLNESLIDLQELGKYEQYIKWPWYIWLGFIAGLIAIVMVTIMLCCMTSCCSCLKGCCSCGSCCKFDEDDSEPVLKGVKLHYT

SEQ ID NO: 323 - protein, 1273 aa, Artificial Sequence
  source: /note="Description of Artificial Sequence: Synthetic polypeptide"
MFVFLVLLPLVSSQCVNLTTRTQLPPAYTNSFTRGVYYPDKVFRSSVLHSTQDLFLPFFSNVTWFHAIHVSGTNGTKRFDNPVLPFNDGVYFASTEKSNIIRGWIFGTTLDSKTQSLLIVNNATNVVIKVCEFQFCNDPFLGVYYHKNNKSWMESEFRVYSSANNCTFEYVSQPFLMDLEGKQGNFKNLREFVFKNIDGYFKIYSKHTPINLVRDLPQGFSALEPLVDLPIGINITRFQTLLALHRSYLTPGDSSSGWTAGAAAYYVGYLQPRTFLLKYNENGTITDAVDCALDPLSETKCTLKSFTVEKGIYQTSNFRVQPTESIVRFPNITNLCPFGEVFNATRFASVYAWNRKRISNCVADYSVLYNSASFSTFKCYGVSPTKLNDLCFTNVYADSFVIRGDEVRQIAPGQTGKIADYNYKLPDDFTGCVIAWNSNNLDSKVGGNYNYLYRLFRKSNLKPFERDISTEIYQAGSTPCNGVEGFNCYFPLQSYGFQPTNGVGYQPYRVVVLSFELLHAPATVCGPKKSTNLVKNKCVNFNFNGLTGTGVLTESNKKFLPFQQFGRDIADTTDAVRDPQTLEILDITPCSFGGVSVITPGTNTSNQVAVLYQDVNCTEVPVAIHADQLTPTWRVYSTGSNVFQTRAGCLIGAEHVNNSYECDIPIGAGICASYQTQTNSPRRARSVASQSIIAYTMSLGAENSVAYSNNSIAIPTNFTISVTTEILPVSMTKTSVDCTMYICGDSTECSNLLLQYGSFCTQLNRALTGIAVEQDKNTQEVFAQVKQIYKTPPIKDFGGFNFSQILPDPSKPSKRSFIEDLLFNKVTLADAGFIKQYGDCLGDIAARDLICAQKFNGLTVLPPLLTDEMIAQYTSALLAGTITSGWTFGAGPALQIPFAMQMAYRFNGIGVTQNVLYENQKLIANQFNSAIGKIQDSLSSTASALGKLQDVVNQNAQALNTLVKQLSSNFGAISSVLNDILSRLDPPEAEVQIDRLITGRLQSLQTYVTQQLIRAAEIRASANLAATKMSECVLGQSKRVDFCGKGYHLMSFPQSAPHGVVFLHVTYVPAQEKNFTTAPAICHDGKAHFPREGVFVSNGTHWFVTQRNFYEPQIITTDNTFVSGNCDVVIGIVNNTVYDPLQPELDSFKEELDKYFKNHTSPDVDLGDISGINASVVNIQKEIDRLNEVAKNLNESLIDLQELGKYEQYIKWPWYIWLGFIAGLIAIVMVTIMLCCMTSCCSCLKGCCSCGSCCKFDEDDSEPVLKGVKLHYT

SEQ ID NO: 324 - protein, 1273 aa, Artificial Sequence
  source: /note="Description of Artificial Sequence: Synthetic polypeptide"
MFVFLVLLPLVSSQCVNLTTRTQLPPAYTNSFTRGVYYPDKVFRSSVLHSTQDLFLPFFSNVTWFHAIHVSGTNGTKRFDNPVLPFNDGVYFASTEKSNIIRGWIFGTTLDSKTQSLLIVNNATNVVIKVCEFQFCNDPFLGVYYHKNNKSWMESEFRVYSSANNCTFEYVSQPFLMDLEGKQGNFKNLREFVFKNIDGYFKIYSKHTPINLVRDLPQGFSALEPLVDLPIGINITRFQTLLALHRSYLTPGDSSSGWTAGAAAYYVGYLQPRTFLLKYNENGTITDAVDCALDPLSETKCTLKSFTVEKGIYQTSNFRVQPTESIVRFPNITNLCPFGEVFNATRFASVYAWNRKRISNCVADYSVLYNSASFSTFKCYGVSPTKLNDLCFTNVYADSFVIRGDEVRQIAPGQTGKIADYNYKLPDDFTGCVIAWNSNNLDSKVGGNYNYLYRLFRKSNLKPFERDISTEIYQAGSTPCNGVEGFNCYFPLQSYGFQPTNGVGYQPYRVVVLSFELLHAPATVCGPKKSTNLVKNKCVNFNFNGLTGTGVLTESNKKFLPFQQFGRDIADTTDAVRDPQTLEILDITPCSFGGVSVITPGTNTSNQVAVLYQNVNCTEVPVAIHADQLTPTWRVYSTGSNVFQTRAGCLIGAEHVNNSYECDIPIGAGICASYQTQTNSPRRARSVASQSIIAYTMSLGAENSVAYSNNSIAIPTNFTISVTTEILPVSMTKTSVDCTMYICGDSTECSNLLLQYGSFCTQLNRALTGIAVEQDKNTQEVFAQVKQIYKTPPIKDFGGFNFSQILPDPSKPSKRSFIEDLLFNKVTLADAGFIKQYGDCLGDIAARDLICAQKFNGLTVLPPLLTDEMIAQYTSALLAGTITSGWTFGAGAALQIPFAMQMAYRFNGIGVTQNVLYENQKLIANQFNSAIGKIQDSLSSTASALGKLQDVVNQNAQALNTLVKQLSSNFGAISSVLNDILSRLDPPEAEVQIDRLITGRLQSLQTYVTQQLIRAAEIRASANLAATKMSECVLGQSKRVDFCGKGYHLMSFPQSAPHGVVFLHVTYVPAQEKNFTTAPAICHDGKAHFPREGVFVSNGTHWFVTQRNFYEPQIITTDNTFVSGNCDVVIGIVNNTVYDPLQPELDSFKEELDKYFKNHTSPDVDLGDISGINASVVNIQKEIDRLNEVAKNLNESLIDLQELGKYEQYIKWPWYIWLGFIAGLIAIVMVTIMLCCMTSCCSCLKGCCSCGSCCKFDEDDSEPVLKGVKLHYT

SEQ ID NO: 325 - protein, 1273 aa, Artificial Sequence
  source: /note="Description of Artificial Sequence: Synthetic polypeptide"
MFVFLVLLPLVSSQCVNLTTRTQLPPAYTNSFTRGVYYPDKVFRSSVLHSTQDLFLPFFSNVTWFHAIHVSGTNGTKRFDNPVLPFNDGVYFASTEKSNIIRGWIFGTTLDSKTQSLLIVNNATNVVIKVCEFQFCNDPFLGVYYHKNNKSWMESEFRVYSSANNCTFEYVSQPFLMDLEGKQGNFKNLREFVFKNIDGYFKIYSKHTPINLVRDLPQGFSALEPLVDLPIGINITRFQTLLALHRSYLTPGDSSSGWTAGAAAYYVGYLQPRTFLLKYNENGTITDAVDCALDPLSETKCTLKSFTVEKGIYQTSNFRVQPTESIVRFPNITNLCPFGEVFNATRFASVYAWNRKRISNCVADYSVLYNSASFSTFKCYGVSPTKLNDLCFTNVYADSFVIRGDEVRQIAPGQTGKIADYNYKLPDDFTGCVIAWNSNNLDSKVGGNYNYLYRLFRKSNLKPFERDISTEIYQAGSTPCNGVEGFNCYFPLQSYGFQPTNGVGYQPYRVVVLSFELLHAPATVCGPKKSTNLVKNKCVNFNFNGLTGTGVLTESNKKFLPFQQFGRDIADITDAVRDPQTLEILDITPCSFGGVSVITPGTNTSNQVAVLYQDVNCTEVPVAIHADQLTPTWRVYSTGSNVFQTRAGCLIGAEHVNNSYECDIPIGAGICASYQTQTNSPRRARSVASQSIIAYTMSLGAENSVAYSNNSIAIPTNFTISVTTEILPVSMTKTSVDCTMYICGDSTECSNLLLQYGSFCTQLNRALTGIAVEQDKNTQEVFAQVKQIYKTPPIKDFGGFNFSQILPDPSKPSKRSFIEDLLFNKVTLADAGFIKQYGDCLGDIAARDLICAQKFNGLTVLPPLLTDEMIAQYTSALLAGTITSGWTFGAGAALQIPFAMQMAYRFNGIGVTQNVLYENQKLIANQFNSAIGKIQDSLSSTASALGKLQDVVNQNAQALNTLVKQLSSNFGAISSVLNDILSRLDPPEAEVQIDRLITGRLQSLQTYVTQQLIRAAEIRASANLAATKMSECVLGQSKRVDFCGKGYHLMSFPQSAPHGVVFLHVTYVPAQEKNFTTAPAICHDGKAHFPREGVFVSNGTHWFVTQRNFYEPQIITTDNTFVSGNCDVVIGIVNNTVYDPLQPELDSFKEELDKYFKNHTSPDVDLGDISGINASVVNIQKEIDRLNEVAKNLNESLIDLQELGKYEQYIKWPWYIWLGFIAGLIAIVMVTIMLCCMTSCCSCLKGCCSCGSCCKFDEDDSEPVLKGVKLHYT

SEQ ID NO: 326 - protein, 1273 aa, Artificial Sequence
  source: /note="Description of Artificial Sequence: Synthetic polypeptide"
MFVFLVLLPLVSSQCVNLTTRTQLPPAYTNSFTRGVYYPDKVFRSSVLHSTQDLFLPFFSNVTWFHAIHVSGTNGTKRFDNPVLPFNDGVYFASTEKSNIIRGWIFGTTLDSKTQSLLIVNNATNVVIKVCEFQFCNDPFLGVYYHKNNKSWMESEFRVYSSANNCTFEYVSQPFLMDLEGKQGNFKNLREFVFKNIDGYFKIYSKHTPINLVRDLPQGFSALEPLVDLPIGINITRFQTLLALHRSYLTPGDSSSGWTAGAAAYYVGYLQPRTFLLKYNENGTITDAVDCALDPLSETKCTLKSFTVEKGIYQTSNFRVQPTESIVRFPNITNLCPFGEVFNATRFASVYAWNRKRISNCVADYSVLYNSASFSTFKCYGVSPTKLNDLCFTNVYADSFVIRGDEVRQIAPGQTGKIADYNYKLPDDFTGCVIAWNSNNLDSKVGGNYNYLYRLFRKSNLKPFERDISTEIYQAGSTPCNGVEGFNCYFPLQSYGFQPTNGVGYQPYRVVVLSFELLHAPATVCGPKKSTPLVKNKCVNFNFNGLTGTGVLTESNKKFLPFQQFGRDIADTTDAVRDPQTLEILDITPCSFGGVSVITPGTNTSNQVAVLYQDVNCTEVPVAIHADQLTPTWRVYSTGSNVFQTRAGCLIGAEHVNNSYECDIPIGAGICASYQTQTNSPRRARSVASQSIIAYTMSLGAENSVAYSNNSIAIPTNFTISVTTEILPVSMTKTSVDCTMYICGDSTECSNLLLQYGSFCTQLNRALTGIAVEQDKNTQEVFAQVKQIYKTPPIKDFGGFNFSQILPDPSKPSKRSFIEDLLFNKVTLADAGFIKQYGDCLGDIAARDLICAQKFNGLTVLPPLLTDEMIAQYTSALLAGTITSGWTFGAGAALQIPFAMQMAYRFNGIGVTQNVLYENQKLIANQFNSAIGKIQDSLSSTASALGKLQDVVNQNAQALNTLVKQLSSNFGAISSVLNDILSRLDPPEAEVQIDRLITGRLQSLQTYVTQQLIRAAEIRASANLAATKMSECVLGQSKRVDFCGKGYHLMSFPQSAPHGVVFLHVTYVPAQEKNFTTAPAICHDGKAHFPREGVFVSNGTHWFVTQRNFYEPQIITTDNTFVSGNCDVVIGIVNNTVYDPLQPELDSFKEELDKYFKNHTSPDVDLGDISGINASVVNIQKEIDRLNEVAKNLNESLIDLQELGKYEQYIKWPWYIWLGFIAGLIAIVMVTIMLCCMTSCCSCLKGCCSCGSCCKFDEDDSEPVLKGVKLHYT

SEQ ID NO: 327 - protein, 1273 aa, Artificial Sequence
  source: /note="Description of Artificial Sequence: Synthetic polypeptide"
MFVFLVLLPLVSSQCVNLTTRTQLPPAYTNSFTRGVYYPDKVFRSSVLHSTQDLFLPFFSNVTWFHAIHVSGTNGTKRFDNPVLPFNDGVYFASTEKSNIIRGWIFGTTLDSKTQSLLIVNNATNVVIKVCEFQFCNDPFLGVYYHKNNKSWMESEFRVYSSANNCTFEYVSQPFLMDLEGKQGNFKNLREFVFKNIDGYFKIYSKHTPINLVRDLPQGFSALEPLVDLPIGINITRFQTLLALHRSYLTPGDSSSGWTAGAAAYYVGYLQPRTFLLKYNENGTITDAVDCALDPLSETKCTLKSFTVEKGIYQTSNFRVQPTESIVRFPNITNLCPFGEVFNATRFASVYAWNRKRISNCVADYSVLYNSASFSTFKCYGVSPTKLNDLCFTNVYADSFVIRGDEVRQIAPGQTGKIADYNYKLPDDFTGCVIAWNSNNLDSKVGGNYNYLYRLFRKSNLKPFERDISTEIYQAGSTPCNGVEGFNCYFPLQSYGFQPTNGVGYQPYRVVVLSFELLHAPATVCGPKKSTNLVKNKCVNFNFNGLTGTGVLTESNKKFLPFQQFGRDIADTTDAVRDPQTLEILDITPCSFGGVSVITPGTNTSNQVAVLYQDVNCTEVPVAIHADQLTPTWRVYSTGSNVFQTRAGCLIGAEHVNNSYECDIPIGAGICASYQTQTNSPRRARSVASQSIIAYTMSLGAENSVAYSNNSIAIPTNFTISVTTEILPVSMTKTSVDCTMYICGDSTECSNLLLQYGSFCTQLNRALTGIAVEQDKNTQEVFAQVKQIYKTPPIKDFGGFNFSQILPDPSKPSKRSFIEDLLFNKVTLADAGFIKQYGDCLGDIAARDLICAQKFNGLTVLPPLLTDEMIAQYTSALLACTITSGWTCGAGAALQIPFAMQMAYRFNGIGVTQNVLYENQKLIANQFNSAIGKIQDSLSSTASALGKLQDVVNQNAQALNTLVKQLSSNFGAISSVLNDILSRLDPPEAEVQIDRLITGRLQSLQTYVTQQLIRAAEIRASANLAATKMSECVLGQSKRVDFCGKGYHLMSFPQSAPHGVVFLHVTYVPAQEKNFTTAPAICHDGKAHFPREGVFVSNGTHWFVTQRNFYEPQIITTDNTFVSGNCDVVIGIVNNTVYDPLQPELDSFKEELDKYFKNHTSPDVDLGDISGINASVVNIQKEIDRLNEVAKNLNESLIDLQELGKYEQYIKWPWYIWLGFIAGLIAIVMVTIMLCCMTSCCSCLKGCCSCGSCCKFDEDDSEPVLKGVKLHYT

SEQ ID NO: 328 - protein, 1273 aa, Artificial Sequence
  source: /note="Description of Artificial Sequence: Synthetic polypeptide"
MFVFLVLLPLVSSQCVNLTTRTQLPPAYTNSFTRGVYYPDKVFRSSVLHSTQDLFLPFFSNVTWFHAIHVSGTNGTKRFDNPVLPFNDGVYFASTEKSNIIRGWIFGTTLDSKTQSLLIVNNATNVVIKVCEFQFCNDPFLGVYYHKNNKSWMESEFRVYSSANNCTFEYVSQPFLMDLEGKQGNFKNLREFVFKNIDGYFKIYSKHTPINLVRDLPQGFSALEPLVDLPIGINITRFQTLLALHRSYLTPGDSSSGWTAGAAAYYVGYLQPRTFLLKYNENGTITDAVDCALDPLSETKCTLKSFTVEKGIYQTSNFRVQPTESIVRFPNITNLCPFGEVFNATRFASVYAWNRKRISNCVADYSVLYNSASFSTFKCYGVSPTKLNDLCFTNVYADSFVIRGDEVRQIAPGQTGKIADYNYKLPDDFTGCVIAWNSNNLDSKVGGNYNYLYRLFRKSNLKPFERDISTEIYQAGSTPCNGVEGFNCYFPLQSYGFQPTNGVGYQPYRVVVLSFELLHAPATVCGPKKSTNLVKNKCVNFNFNGLTGTGVLTESNKKFLPFQQFGRDIADTTDAVRDPQTLEILDITPCSFGGVSVITPGTNTSNQVAVLYQDVNCTEVPVAIHADQLTPTWRVYSTGSNVFQTRAGCLIGAEHVNNSYECDIPIGAGICASYQTQTNSPRRARSVASQSIIAYTMSLGAENSVAYSNNSIAIPTNFTISVTTEILPVSMTKTSVDCTMYICGDSTECSNLLLQYGSFCTQLNRALTGIAVEQDKNTQEVFAQVKQIYKTPPIKDFGGFNFSQILPDPSKPSKRSFIEDLLFNKVTLADAGFIKQYGDCLGDIAARDLICAQKFNGLTVLPPLLTDEMIAQYTSALLAGTITCGWTFGAGACLQIPFAMQMAYRFNGIGVTQNVLYENQKLIANQFNSAIGKIQDSLSSTASALGKLQDVVNQNAQALNTLVKQLSSNFGAISSVLNDILSRLDPPEAEVQIDRLITGRLQSLQTYVTQQLIRAAEIRASANLAATKMSECVLGQSKRVDFCGKGYHLMSFPQSAPHGVVFLHVTYVPAQEKNFTTAPAICHDGKAHFPREGVFVSNGTHWFVTQRNFYEPQIITTDNTFVSGNCDVVIGIVNNTVYDPLQPELDSFKEELDKYFKNHTSPDVDLGDISGINASVVNIQKEIDRLNEVAKNLNESLIDLQELGKYEQYIKWPWYIWLGFIAGLIAIVMVTIMLCCMTSCCSCLKGCCSCGSCCKFDEDDSEPVLKGVKLHYT

SEQ ID NO: 329 - protein, 1273 aa, Artificial Sequence
  source: /note="Description of Artificial Sequence: Synthetic polypeptide"
MFVFLVLLPLVSSQCVNLTTRTQLPPAYTNSFTRGVYYPDKVFRSSVLHSTQDLFLPFFSNVTWFHAIHVSGTNGTKRFDNPVLPFNDGVYFASTEKSNIIRGWIFGTTLDSKTQSLLIVNNATNVVIKVCEFQFCNDPFLGVYYHKNNKSWMESEFRVYSSANNCTFEYVSQPFLMDLEGKQGNFKNLREFVFKNIDGYFKIYSKHTPINLVRDLPQGFSALEPLVDLPIGINITRFQTLLALHRSYLTPGDSSSGWTAGAAAYYVGYLQPRTFLLKYNENGTITDAVDCALDPLSETKCTLKSFTVEKGIYQTSNFRVQPTESIVRFPNITNLCPFGEVFNATRFASVYAWNRKRISNCVADYSVLYNSASFSTFKCYGVSPTKLNDLCFTNVYADSFVIRGDEVRQIAPGQTGKIADYNYKLPDDFTGCVIAWNSNNLDSKVGGNYNYLYRLFRKSNLKPFERDISTEIYQAGSTPCNGVEGFNCYFPLQSYGFQPTNGVGYQPYRVVVLSFELLHAPATVCGPKKSTNLVKNKCVNFNFNGLTGTGVLTESNKKFLPFQQFGRDIADTTDAVRDPQTLEILDITPCSFGGVSVITPGTNTSNQVAVLYQDVNCTEVPVAIHADQLTPTWRVYSTGSNVFQTRAGCLIGAEHVNNSYECDIPIGAGICASYQTQTNSPRRARSVASQSIIAYTMSLGAENSVAYSNNSIAIPTNFTISVTTEILPVSMTKTSVDCTMYICGDSTECSNLLLQYGSFCTQLNRALTGIAVEQDKNTQEVFAQVKQIYKTPPIKDFGGFNFSQILPDPSKPSKRSFIEDLLFNKVTLADAGFIKQYGDCLGDIAARDLICAQKFNGLTVLPPLLTDEMIAQYTSALLAGTITSGWTFGAGPALQIPFAMQMAYRFNGIGVTQNVLYENQKLIANQFNSAIGKIQDSLSSTPSALGKLQDVVNQNAQALNTLVKQLSSNFGAISSVLNDILSRLDPPEAEVQIDRLITGRLQSLQTYVTQQLIRAAEIRASANLAATKMSECVLGQSKRVDFCGKGYHLMSFPQSAPHGVVFLHVTYVPAQEKNFTTAPAICHDGKAHFPREGVFVSNGTHWFVTQRNFYEPQIITTDNTFVSGNCDVVIGIVNNTVYDPLQPELDSFKEELDKYFKNHTSPDVDLGDISGINASVVNIQKEIDRLNEVAKNLNESLIDLQELGKYEQYIKWPWYIWLGFIAGLIAIVMVTIMLCCMTSCCSCLKGCCSCGSCCKFDEDDSEPVLKGVKLHYT

SEQ ID NO: 330 - protein, 1273 aa, Artificial Sequence
  source: /note="Description of Artificial Sequence: Synthetic polypeptide"
MFVFLVLLPLVSSQCVNLTTRTQLPPAYTNSFTRGVYYPDKVFRSSVLHSTQDLFLPFFSNVTWFHAIHVSGTNGTKRFDNPVLPFNDGVYFASTEKSNIIRGWIFGTTLDSKTQSLLIVNNATNVVIKVCEFQFCNDPFLGVYYHKNNKSWMESEFRVYSSANNCTFEYVSQPFLMDLEGKQGNFKNLREFVFKNIDGYFKIYSKHTPINLVRDLPQGFSALEPLVDLPIGINITRFQTLLALHRSYLTPGDSSSGWTAGAAAYYVGYLQPRTFLLKYNENGTITDAVDCALDPLSETKCTLKSFTVEKGIYQTSNFRVQPTESIVRFPNITNLCPFGEVFNATRFASVYAWNRKRISNCVADYSVLYNSASFSTFKCYGVSPTKLNDLCFTNVYADSFVIRGDEVRQIAPGQTGKIADYNYKLPDDFTGCVIAWNSNNLDSKVGGNYNYLYRLFRKSNLKPFERDISTEIYQAGSTPCNGVEGFNCYFPLQSYGFQPTNGVGYQPYRVVVLSFELLHAPATVCGPKKSTNLVKNKCVNFNFNGLTGTGVLTESNKKFLPFQQFGRDIADTTDAVRDPQTLEILDITPCSFGGVSVITPGTNTSNQVAVLYQNVNCTEVPVAIHADQLTPTWRVYSTGSNVFQTRAGCLIGAEHVNNSYECDIPIGAGICASYQTQTNSPRRARSVASQSIIAYTMSLGAENSVAYSNNSIAIPTNFTISVTTEILPVSMTKTSVDCTMYICGDSTECSNLLLQYGSFCTQLNRALTGIAVEQDKNTQEVFAQVKQIYKTPPIKDFGGFNFSQILPDPSKPSKRSFIEDLLFNKVTLADAGFIKQYGDCLGDIAARDLICAQKFNGLTVLPPLLTDEMIAQYTSALLAGTITSGWTFGAGAALQIPFAMQMAYRFNGIGVTQNVLYENQKLIANQFNSAIGKIQDSLSSTPSALGKLQDVVNQNAQALNTLVKQLSSNFGAISSVLNDILSRLDPPEAEVQIDRLITGRLQSLQTYVTQQLIRAAEIRASANLAATKMSECVLGQSKRVDFCGKGYHLMSFPQSAPHGVVFLHVTYVPAQEKNFTTAPAICHDGKAHFPREGVFVSNGTHWFVTQRNFYEPQIITTDNTFVSGNCDVVIGIVNNTVYDPLQPELDSFKEELDKYFKNHTSPDVDLGDISGINASVVNIQKEIDRLNEVAKNLNESLIDLQELGKYEQYIKWPWYIWLGFIAGLIAIVMVTIMLCCMTSCCSCLKGCCSCGSCCKFDEDDSEPVLKGVKLHYT

SEQ ID NO: 331 - protein, 1273 aa, Artificial Sequence
  source: /note="Description of Artificial Sequence: Synthetic polypeptide"
MFVFLVLLPLVSSQCVNLTTRTQLPPAYTNSFTRGVYYPDKVFRSSVLHSTQDLFLPFFSNVTWFHAIHVSGTNGTKRFDNPVLPFNDGVYFASTEKSNIIRGWIFGTTLDSKTQSLLIVNNATNVVIKVCEFQFCNDPFLGVYYHKNNKSWMESEFRVYSSANNCTFEYVSQPFLMDLEGKQGNFKNLREFVFKNIDGYFKIYSKHTPINLVRDLPQGFSALEPLVDLPIGINITRFQTLLALHRSYLTPGDSSSGWTAGAAAYYVGYLQPRTFLLKYNENGTITDAVDCALDPLSETKCTLKSFTVEKGIYQTSNFRVQPTESIVRFPNITNLCPFGEVFNATRFASVYAWNRKRISNCVADYSVLYNSASFSTFKCYGVSPTKLNDLCFTNVYADSFVIRGDEVRQIAPGQTGKIADYNYKLPDDFTGCVIAWNSNNLDSKVGGNYNYLYRLFRKSNLKPFERDISTEIYQAGSTPCNGVEGFNCYFPLQSYGFQPTNGVGYQPYRVVVLSFELLHAPATVCGPKKSTNLVKNKCVNFNFNGLTGTGVLTESNKKFLPFQQFGRDIADITDAVRDPQTLEILDITPCSFGGVSVITPGTNTSNQVAVLYQDVNCTEVPVAIHADQLTPTWRVYSTGSNVFQTRAGCLIGAEHVNNSYECDIPIGAGICASYQTQTNSPRRARSVASQSIIAYTMSLGAENSVAYSNNSIAIPTNFTISVTTEILPVSMTKTSVDCTMYICGDSTECSNLLLQYGSFCTQLNRALTGIAVEQDKNTQEVFAQVKQIYKTPPIKDFGGFNFSQILPDPSKPSKRSFIEDLLFNKVTLADAGFIKQYGDCLGDIAARDLICAQKFNGLTVLPPLLTDEMIAQYTSALLAGTITSGWTFGAGAALQIPFAMQMAYRFNGIGVTQNVLYENQKLIANQFNSAIGKIQDSLSSTPSALGKLQDVVNQNAQALNTLVKQLSSNFGAISSVLNDILSRLDPPEAEVQIDRLITGRLQSLQTYVTQQLIRAAEIRASANLAATKMSECVLGQSKRVDFCGKGYHLMSFPQSAPHGVVFLHVTYVPAQEKNFTTAPAICHDGKAHFPREGVFVSNGTHWFVTQRNFYEPQIITTDNTFVSGNCDVVIGIVNNTVYDPLQPELDSFKEELDKYFKNHTSPDVDLGDISGINASVVNIQKEIDRLNEVAKNLNESLIDLQELGKYEQYIKWPWYIWLGFIAGLIAIVMVTIMLCCMTSCCSCLKGCCSCGSCCKFDEDDSEPVLKGVKLHYT

SEQ ID NO: 332 - protein, 1273 aa, Artificial Sequence
  source: /note="Description of Artificial Sequence: Synthetic polypeptide"
MFVFLVLLPLVSSQCVNLTTRTQLPPAYTNSFTRGVYYPDKVFRSSVLHSTQDLFLPFFSNVTWFHAIHVSGTNGTKRFDNPVLPFNDGVYFASTEKSNIIRGWIFGTTLDSKTQSLLIVNNATNVVIKVCEFQFCNDPFLGVYYHKNNKSWMESEFRVYSSANNCTFEYVSQPFLMDLEGKQGNFKNLREFVFKNIDGYFKIYSKHTPINLVRDLPQGFSALEPLVDLPIGINITRFQTLLALHRSYLTPGDSSSGWTAGAAAYYVGYLQPRTFLLKYNENGTITDAVDCALDPLSETKCTLKSFTVEKGIYQTSNFRVQPTESIVRFPNITNLCPFGEVFNATRFASVYAWNRKRISNCVADYSVLYNSASFSTFKCYGVSPTKLNDLCFTNVYADSFVIRGDEVRQIAPGQTGKIADYNYKLPDDFTGCVIAWNSNNLDSKVGGNYNYLYRLFRKSNLKPFERDISTEIYQAGSTPCNGVEGFNCYFPLQSYGFQPTNGVGYQPYRVVVLSFELLHAPATVCGPKKSTPLVKNKCVNFNFNGLTGTGVLTESNKKFLPFQQFGRDIADTTDAVRDPQTLEILDITPCSFGGVSVITPGTNTSNQVAVLYQDVNCTEVPVAIHADQLTPTWRVYSTGSNVFQTRAGCLIGAEHVNNSYECDIPIGAGICASYQTQTNSPRRARSVASQSIIAYTMSLGAENSVAYSNNSIAIPTNFTISVTTEILPVSMTKTSVDCTMYICGDSTECSNLLLQYGSFCTQLNRALTGIAVEQDKNTQEVFAQVKQIYKTPPIKDFGGFNFSQILPDPSKPSKRSFIEDLLFNKVTLADAGFIKQYGDCLGDIAARDLICAQKFNGLTVLPPLLTDEMIAQYTSALLAGTITSGWTFGAGAALQIPFAMQMAYRFNGIGVTQNVLYENQKLIANQFNSAIGKIQDSLSSTPSALGKLQDVVNQNAQALNTLVKQLSSNFGAISSVLNDILSRLDPPEAEVQIDRLITGRLQSLQTYVTQQLIRAAEIRASANLAATKMSECVLGQSKRVDFCGKGYHLMSFPQSAPHGVVFLHVTYVPAQEKNFTTAPAICHDGKAHFPREGVFVSNGTHWFVTQRNFYEPQIITTDNTFVSGNCDVVIGIVNNTVYDPLQPELDSFKEELDKYFKNHTSPDVDLGDISGINASVVNIQKEIDRLNEVAKNLNESLIDLQELGKYEQYIKWPWYIWLGFIAGLIAIVMVTIMLCCMTSCCSCLKGCCSCGSCCKFDEDDSEPVLKGVKLHYT

SEQ ID NO: 333 - protein, 1273 aa, Artificial Sequence
  source: /note="Description of Artificial Sequence: Synthetic polypeptide"
MFVFLVLLPLVSSQCVNLTTRTQLPPAYTNSFTRGVYYPDKVFRSSVLHSTQDLFLPFFSNVTWFHAIHVSGTNGTKRFDNPVLPFNDGVYFASTEKSNIIRGWIFGTTLDSKTQSLLIVNNATNVVIKVCEFQFCNDPFLGVYYHKNNKSWMESEFRVYSSANNCTFEYVSQPFLMDLEGKQGNFKNLREFVFKNIDGYFKIYSKHTPINLVRDLPQGFSALEPLVDLPIGINITRFQTLLALHRSYLTPGDSSSGWTAGAAAYYVGYLQPRTFLLKYNENGTITDAVDCALDPLSETKCTLKSFTVEKGIYQTSNFRVQPTESIVRFPNITNLCPFGEVFNATRFASVYAWNRKRISNCVADYSVLYNSASFSTFKCYGVSPTKLNDLCFTNVYADSFVIRGDEVRQIAPGQTGKIADYNYKLPDDFTGCVIAWNSNNLDSKVGGNYNYLYRLFRKSNLKPFERDISTEIYQAGSTPCNGVEGFNCYFPLQSYGFQPTNGVGYQPYRVVVLSFELLHAPATVCGPKKSTNLVKNKCVNFNFNGLTGTGVLTESNKKFLPFQQFGRDIADTTDAVRDPQTLEILDITPCSFGGVSVITPGTNTSNQVAVLYQDVNCTEVPVAIHADQLTPTWRVYSTGSNVFQTRAGCLIGAEHVNNSYECDIPIGAGICASYQTQTNSPRRARSVASQSIIAYTMSLGAENSVAYSNNSIAIPTNFTISVTTEILPVSMTKTSVDCTMYICGDSTECSNLLLQYGSFCTQLNRALTGIAVEQDKNTQEVFAQVKQIYKTPPIKDFGGFNFSQILPDPSKPSKRSFIEDLLFNKVTLADAGFIKQYGDCLGDIAARDLICAQKFNGLTVLPPLLTDEMIAQYTSALLACTITSGWTCGAGAALQIPFAMQMAYRFNGIGVTQNVLYENQKLIANQFNSAIGKIQDSLSSTPSALGKLQDVVNQNAQALNTLVKQLSSNFGAISSVLNDILSRLDPPEAEVQIDRLITGRLQSLQTYVTQQLIRAAEIRASANLAATKMSECVLGQSKRVDFCGKGYHLMSFPQSAPHGVVFLHVTYVPAQEKNFTTAPAICHDGKAHFPREGVFVSNGTHWFVTQRNFYEPQIITTDNTFVSGNCDVVIGIVNNTVYDPLQPELDSFKEELDKYFKNHTSPDVDLGDISGINASVVNIQKEIDRLNEVAKNLNESLIDLQELGKYEQYIKWPWYIWLGFIAGLIAIVMVTIMLCCMTSCCSCLKGCCSCGSCCKFDEDDSEPVLKGVKLHYT

SEQ ID NO: 334 - protein, 1273 aa, Artificial Sequence
  source: /note="Description of Artificial Sequence: Synthetic polypeptide"
MFVFLVLLPLVSSQCVNLTTRTQLPPAYTNSFTRGVYYPDKVFRSSVLHSTQDLFLPFFSNVTWFHAIHVSGTNGTKRFDNPVLPFNDGVYFASTEKSNIIRGWIFGTTLDSKTQSLLIVNNATNVVIKVCEFQFCNDPFLGVYYHKNNKSWMESEFRVYSSANNCTFEYVSQPFLMDLEGKQGNFKNLREFVFKNIDGYFKIYSKHTPINLVRDLPQGFSALEPLVDLPIGINITRFQTLLALHRSYLTPGDSSSGWTAGAAAYYVGYLQPRTFLLKYNENGTITDAVDCALDPLSETKCTLKSFTVEKGIYQTSNFRVQPTESIVRFPNITNLCPFGEVFNATRFASVYAWNRKRISNCVADYSVLYNSASFSTFKCYGVSPTKLNDLCFTNVYADSFVIRGDEVRQIAPGQTGKIADYNYKLPDDFTGCVIAWNSNNLDSKVGGNYNYLYRLFRKSNLKPFERDISTEIYQAGSTPCNGVEGFNCYFPLQSYGFQPTNGVGYQPYRVVVLSFELLHAPATVCGPKKSTNLVKNKCVNFNFNGLTGTGVLTESNKKFLPFQQFGRDIADTTDAVRDPQTLEILDITPCSFGGVSVITPGTNTSNQVAVLYQDVNCTEVPVAIHADQLTPTWRVYSTGSNVFQTRAGCLIGAEHVNNSYECDIPIGAGICASYQTQTNSPRRARSVASQSIIAYTMSLGAENSVAYSNNSIAIPTNFTISVTTEILPVSMTKTSVDCTMYICGDSTECSNLLLQYGSFCTQLNRALTGIAVEQDKNTQEVFAQVKQIYKTPPIKDFGGFNFSQILPDPSKPSKRSFIEDLLFNKVTLADAGFIKQYGDCLGDIAARDLICAQKFNGLTVLPPLLTDEMIAQYTSALLAGTITCGWTFGAGACLQIPFAMQMAYRFNGIGVTQNVLYENQKLIANQFNSAIGKIQDSLSSTPSALGKLQDVVNQNAQALNTLVKQLSSNFGAISSVLNDILSRLDPPEAEVQIDRLITGRLQSLQTYVTQQLIRAAEIRASANLAATKMSECVLGQSKRVDFCGKGYHLMSFPQSAPHGVVFLHVTYVPAQEKNFTTAPAICHDGKAHFPREGVFVSNGTHWFVTQRNFYEPQIITTDNTFVSGNCDVVIGIVNNTVYDPLQPELDSFKEELDKYFKNHTSPDVDLGDISGINASVVNIQKEIDRLNEVAKNLNESLIDLQELGKYEQYIKWPWYIWLGFIAGLIAIVMVTIMLCCMTSCCSCLKGCCSCGSCCKFDEDDSEPVLKGVKLHYT

SEQ ID NO: 335 - protein, 1273 aa, Artificial Sequence
  source: /note="Description of Artificial Sequence: Synthetic polypeptide"
MFVFLVLLPLVSSQCVNLTTRTQLPPAYTNSFTRGVYYPDKVFRSSVLHSTQDLFLPFFSNVTWFHAIHVSGTNGTKRFDNPVLPFNDGVYFASTEKSNIIRGWIFGTTLDSKTQSLLIVNNATNVVIKVCEFQFCNDPFLGVYYHKNNKSWMESEFRVYSSANNCTFEYVSQPFLMDLEGKQGNFKNLREFVFKNIDGYFKIYSKHTPINLVRDLPQGFSALEPLVDLPIGINITRFQTLLALHRSYLTPGDSSSGWTAGAAAYYVGYLQPRTFLLKYNENGTITDAVDCALDPLSETKCTLKSFTVEKGIYQTSNFRVQPTESIVRFPNITNLCPFGEVFNATRFASVYAWNRKRISNCVADYSVLYNSASFSTFKCYGVSPTKLNDLCFTNVYADSFVIRGDEVRQIAPGQTGKIADYNYKLPDDFTGCVIAWNSNNLDSKVGGNYNYLYRLFRKSNLKPFERDISTEIYQAGSTPCNGVEGFNCYFPLQSYGFQPTNGVGYQPYRVVVLSFELLHAPATVCGPKKSTNLVKNKCVNFNFNGLTGTGVLTESNKKFLPFQQFGRDIADTTDAVRDPQTLEILDITPCSFGGVSVITPGTNTSNQVAVLYQNVNCTEVPVAIHADQLTPTWRVYSTGSNVFQTRAGCLIGAEHVNNSYECDIPIGAGICASYQTQTNSPRRARSVASQSIIAYTMSLGAENSVAYSNNSIAIPTNFTISVTTEILPVSMTKTSVDCTMYICGDSTECSNLLLQYGSFCTQLNRALTGIAVEQDKNTQEVFAQVKQIYKTPPIKDFGGFNFSQILPDPSKPSKRSFIEDLLFNKVTLADAGFIKQYGDCLGDIAARDLICAQKFNGLTVLPPLLTDEMIAQYTSALLAGTITSGWTFGAGPALQIPFAMQMAYRFNGIGVTQNVLYENQKLIANQFNSAIGKIQDSLSSTASALGKLQDVVNQNAQALNTLVKQLSSNFGAISSVLNDILSRLDPPEAEVQIDRLITGRLQSLQTYVTQQLIRAAEIRASANLAATKMSECVLGQSKRVDFCGKGYHLMSFPQSAPHGVVFLHVTYVPAQEKNFTTAPAICHDGKAHFPREGVFVSNGTHWFVTQRNFYEPQIITTDNTFVSGNCDVVIGIVNNTVYDPLQPELDSFKEELDKYFKNHTSPDVDLGDISGINASVVNIQKEIDRLNEVAKNLNESLIDLQELGKYEQYIKWPWYIWLGFIAGLIAIVMVTIMLCCMTSCCSCLKGCCSCGSCCKFDEDDSEPVLKGVKLHYT

SEQ ID NO: 336 - protein, 1273 aa, Artificial Sequence
  source: /note="Description of Artificial Sequence: Synthetic polypeptide"
MFVFLVLLPLVSSQCVNLTTRTQLPPAYTNSFTRGVYYPDKVFRSSVLHSTQDLFLPFFSNVTWFHAIHVSGTNGTKRFDNPVLPFNDGVYFASTEKSNIIRGWIFGTTLDSKTQSLLIVNNATNVVIKVCEFQFCNDPFLGVYYHKNNKSWMESEFRVYSSANNCTFEYVSQPFLMDLEGKQGNFKNLREFVFKNIDGYFKIYSKHTPINLVRDLPQGFSALEPLVDLPIGINITRFQTLLALHRSYLTPGDSSSGWTAGAAAYYVGYLQPRTFLLKYNENGTITDAVDCALDPLSETKCTLKSFTVEKGIYQTSNFRVQPTESIVRFPNITNLCPFGEVFNATRFASVYAWNRKRISNCVADYSVLYNSASFSTFKCYGVSPTKLNDLCFTNVYADSFVIRGDEVRQIAPGQTGKIADYNYKLPDDFTGCVIAWNSNNLDSKVGGNYNYLYRLFRKSNLKPFERDISTEIYQAGSTPCNGVEGFNCYFPLQSYGFQPTNGVGYQPYRVVVLSFELLHAPATVCGPKKSTNLVKNKCVNFNFNGLTGTGVLTESNKKFLPFQQFGRDIADITDAVRDPQTLEILDITPCSFGGVSVITPGTNTSNQVAVLYQDVNCTEVPVAIHADQLTPTWRVYSTGSNVFQTRAGCLIGAEHVNNSYECDIPIGAGICASYQTQTNSPRRARSVASQSIIAYTMSLGAENSVAYSNNSIAIPTNFTISVTTEILPVSMTKTSVDCTMYICGDSTECSNLLLQYGSFCTQLNRALTGIAVEQDKNTQEVFAQVKQIYKTPPIKDFGGFNFSQILPDPSKPSKRSFIEDLLFNKVTLADAGFIKQYGDCLGDIAARDLICAQKFNGLTVLPPLLTDEMIAQYTSALLAGTITSGWTFGAGPALQIPFAMQMAYRFNGIGVTQNVLYENQKLIANQFNSAIGKIQDSLSSTASALGKLQDVVNQNAQALNTLVKQLSSNFGAISSVLNDILSRLDPPEAEVQIDRLITGRLQSLQTYVTQQLIRAAEIRASANLAATKMSECVLGQSKRVDFCGKGYHLMSFPQSAPHGVVFLHVTYVPAQEKNFTTAPAICHDGKAHFPREGVFVSNGTHWFVTQRNFYEPQIITTDNTFVSGNCDVVIGIVNNTVYDPLQPELDSFKEELDKYFKNHTSPDVDLGDISGINASVVNIQKEIDRLNEVAKNLNESLIDLQELGKYEQYIKWPWYIWLGFIAGLIAIVMVTIMLCCMTSCCSCLKGCCSCGSCCKFDEDDSEPVLKGVKLHYT

SEQ ID NO: 337 - protein, 1273 aa, Artificial Sequence
  source: /note="Description of Artificial Sequence: Synthetic polypeptide"
MFVFLVLLPLVSSQCVNLTTRTQLPPAYTNSFTRGVYYPDKVFRSSVLHSTQDLFLPFFSNVTWFHAIHVSGTNGTKRFDNPVLPFNDGVYFASTEKSNIIRGWIFGTTLDSKTQSLLIVNNATNVVIKVCEFQFCNDPFLGVYYHKNNKSWMESEFRVYSSANNCTFEYVSQPFLMDLEGKQGNFKNLREFVFKNIDGYFKIYSKHTPINLVRDLPQGFSALEPLVDLPIGINITRFQTLLALHRSYLTPGDSSSGWTAGAAAYYVGYLQPRTFLLKYNENGTITDAVDCALDPLSETKCTLKSFTVEKGIYQTSNFRVQPTESIVRFPNITNLCPFGEVFNATRFASVYAWNRKRISNCVADYSVLYNSASFSTFKCYGVSPTKLNDLCFTNVYADSFVIRGDEVRQIAPGQTGKIADYNYKLPDDFTGCVIAWNSNNLDSKVGGNYNYLYRLFRKSNLKPFERDISTEIYQAGSTPCNGVEGFNCYFPLQSYGFQPTNGVGYQPYRVVVLSFELLHAPATVCGPKKSTPLVKNKCVNFNFNGLTGTGVLTESNKKFLPFQQFGRDIADTTDAVRDPQTLEILDITPCSFGGVSVITPGTNTSNQVAVLYQDVNCTEVPVAIHADQLTPTWRVYSTGSNVFQTRAGCLIGAEHVNNSYECDIPIGAGICASYQTQTNSPRRARSVASQSIIAYTMSLGAENSVAYSNNSIAIPTNFTISVTTEILPVSMTKTSVDCTMYICGDSTECSNLLLQYGSFCTQLNRALTGIAVEQDKNTQEVFAQVKQIYKTPPIKDFGGFNFSQILPDPSKPSKRSFIEDLLFNKVTLADAGFIKQYGDCLGDIAARDLICAQKFNGLTVLPPLLTDEMIAQYTSALLAGTITSGWTFGAGPALQIPFAMQMAYRFNGIGVTQNVLYENQKLIANQFNSAIGKIQDSLSSTASALGKLQDVVNQNAQALNTLVKQLSSNFGAISSVLNDILSRLDPPEAEVQIDRLITGRLQSLQTYVTQQLIRAAEIRASANLAATKMSECVLGQSKRVDFCGKGYHLMSFPQSAPHGVVFLHVTYVPAQEKNFTTAPAICHDGKAHFPREGVFVSNGTHWFVTQRNFYEPQIITTDNTFVSGNCDVVIGIVNNTVYDPLQPELDSFKEELDKYFKNHTSPDVDLGDISGINASVVNIQKEIDRLNEVAKNLNESLIDLQELGKYEQYIKWPWYIWLGFIAGLIAIVMVTIMLCCMTSCCSCLKGCCSCGSCCKFDEDDSEPVLKGVKLHYT

SEQ ID NO: 338 - protein, 1273 aa, Artificial Sequence
  source: /note="Description of Artificial Sequence: Synthetic polypeptide"
MFVFLVLLPLVSSQCVNLTTRTQLPPAYTNSFTRGVYYPDKVFRSSVLHSTQDLFLPFFSNVTWFHAIHVSGTNGTKRFDNPVLPFNDGVYFASTEKSNIIRGWIFGTTLDSKTQSLLIVNNATNVVIKVCEFQFCNDPFLGVYYHKNNKSWMESEFRVYSSANNCTFEYVSQPFLMDLEGKQGNFKNLREFVFKNIDGYFKIYSKHTPINLVRDLPQGFSALEPLVDLPIGINITRFQTLLALHRSYLTPGDSSSGWTAGAAAYYVGYLQPRTFLLKYNENGTITDAVDCALDPLSETKCTLKSFTVEKGIYQTSNFRVQPTESIVRFPNITNLCPFGEVFNATRFASVYAWNRKRISNCVADYSVLYNSASFSTFKCYGVSPTKLNDLCFTNVYADSFVIRGDEVRQIAPGQTGKIADYNYKLPDDFTGCVIAWNSNNLDSKVGGNYNYLYRLFRKSNLKPFERDISTEIYQAGSTPCNGVEGFNCYFPLQSYGFQPTNGVGYQPYRVVVLSFELLHAPATVCGPKKSTNLVKNKCVNFNFNGLTGTGVLTESNKKFLPFQQFGRDIADTTDAVRDPQTLEILDITPCSFGGVSVITPGTNTSNQVAVLYQDVNCTEVPVAIHADQLTPTWRVYSTGSNVFQTRAGCLIGAEHVNNSYECDIPIGAGICASYQTQTNSPRRARSVASQSIIAYTMSLGAENSVAYSNNSIAIPTNFTISVTTEILPVSMTKTSVDCTMYICGDSTECSNLLLQYGSFCTQLNRALTGIAVEQDKNTQEVFAQVKQIYKTPPIKDFGGFNFSQILPDPSKPSKRSFIEDLLFNKVTLADAGFIKQYGDCLGDIAARDLICAQKFNGLTVLPPLLTDEMIAQYTSALLACTITSGWTCGAGPALQIPFAMQMAYRFNGIGVTQNVLYENQKLIANQFNSAIGKIQDSLSSTASALGKLQDVVNQNAQALNTLVKQLSSNFGAISSVLNDILSRLDPPEAEVQIDRLITGRLQSLQTYVTQQLIRAAEIRASANLAATKMSECVLGQSKRVDFCGKGYHLMSFPQSAPHGVVFLHVTYVPAQEKNFTTAPAICHDGKAHFPREGVFVSNGTHWFVTQRNFYEPQIITTDNTFVSGNCDVVIGIVNNTVYDPLQPELDSFKEELDKYFKNHTSPDVDLGDISGINASVVNIQKEIDRLNEVAKNLNESLIDLQELGKYEQYIKWPWYIWLGFIAGLIAIVMVTIMLCCMTSCCSCLKGCCSCGSCCKFDEDDSEPVLKGVKLHYT

SEQ ID NO: 339 - protein, 1273 aa, Artificial Sequence
  source: /note="Description of Artificial Sequence: Synthetic polypeptide"
MFVFLVLLPLVSSQCVNLTTRTQLPPAYTNSFTRGVYYPDKVFRSSVLHSTQDLFLPFFSNVTWFHAIHVSGTNGTKRFDNPVLPFNDGVYFASTEKSNIIRGWIFGTTLDSKTQSLLIVNNATNVVIKVCEFQFCNDPFLGVYYHKNNKSWMESEFRVYSSANNCTFEYVSQPFLMDLEGKQGNFKNLREFVFKNIDGYFKIYSKHTPINLVRDLPQGFSALEPLVDLPIGINITRFQTLLALHRSYLTPGDSSSGWTAGAAAYYVGYLQPRTFLLKYNENGTITDAVDCALDPLSETKCTLKSFTVEKGIYQTSNFRVQPTESIVRFPNITNLCPFGEVFNATRFASVYAWNRKRISNCVADYSVLYNSASFSTFKCYGVSPTKLNDLCFTNVYADSFVIRGDEVRQIAPGQTGKIADYNYKLPDDFTGCVIAWNSNNLDSKVGGNYNYLYRLFRKSNLKPFERDISTEIYQAGSTPCNGVEGFNCYFPLQSYGFQPTNGVGYQPYRVVVLSFELLHAPATVCGPKKSTNLVKNKCVNFNFNGLTGTGVLTESNKKFLPFQQFGRDIADTTDAVRDPQTLEILDITPCSFGGVSVITPGTNTSNQVAVLYQDVNCTEVPVAIHADQLTPTWRVYSTGSNVFQTRAGCLIGAEHVNNSYECDIPIGAGICASYQTQTNSPRRARSVASQSIIAYTMSLGAENSVAYSNNSIAIPTNFTISVTTEILPVSMTKTSVDCTMYICGDSTECSNLLLQYGSFCTQLNRALTGIAVEQDKNTQEVFAQVKQIYKTPPIKDFGGFNFSQILPDPSKPSKRSFIEDLLFNKVTLADAGFIKQYGDCLGDIAARDLICAQKFNGLTVLPPLLTDEMIAQYTSALLAGTITCGWTFGAGPCLQIPFAMQMAYRFNGIGVTQNVLYENQKLIANQFNSAIGKIQDSLSSTASALGKLQDVVNQNAQALNTLVKQLSSNFGAISSVLNDILSRLDPPEAEVQIDRLITGRLQSLQTYVTQQLIRAAEIRASANLAATKMSECVLGQSKRVDFCGKGYHLMSFPQSAPHGVVFLHVTYVPAQEKNFTTAPAICHDGKAHFPREGVFVSNGTHWFVTQRNFYEPQIITTDNTFVSGNCDVVIGIVNNTVYDPLQPELDSFKEELDKYFKNHTSPDVDLGDISGINASVVNIQKEIDRLNEVAKNLNESLIDLQELGKYEQYIKWPWYIWLGFIAGLIAIVMVTIMLCCMTSCCSCLKGCCSCGSCCKFDEDDSEPVLKGVKLHYT

SEQ ID NO: 340 - protein, 1273 aa, Artificial Sequence
  source: /note="Description of Artificial Sequence: Synthetic polypeptide"
MFVFLVLLPLVSSQCVNLTTRTQLPPAYTNSFTRGVYYPDKVFRSSVLHSTQDLFLPFFSNVTWFHAIHVSGTNGTKRFDNPVLPFNDGVYFASTEKSNIIRGWIFGTTLDSKTQSLLIVNNATNVVIKVCEFQFCNDPFLGVYYHKNNKSWMESEFRVYSSANNCTFEYVSQPFLMDLEGKQGNFKNLREFVFKNIDGYFKIYSKHTPINLVRDLPQGFSALEPLVDLPIGINITRFQTLLALHRSYLTPGDSSSGWTAGAAAYYVGYLQPRTFLLKYNENGTITDAVDCALDPLSETKCTLKSFTVEKGIYQTSNFRVQPTESIVRFPNITNLCPFGEVFNATRFASVYAWNRKRISNCVADYSVLYNSASFSTFKCYGVSPTKLNDLCFTNVYADSFVIRGDEVRQIAPGQTGKIADYNYKLPDDFTGCVIAWNSNNLDSKVGGNYNYLYRLFRKSNLKPFERDISTEIYQAGSTPCNGVEGFNCYFPLQSYGFQPTNGVGYQPYRVVVLSFELLHAPATVCGPKKSTNLVKNKCVNFNFNGLTGTGVLTESNKKFLPFQQFGRDIADITDAVRDPQTLEILDITPCSFGGVSVITPGTNTSNQVAVLYQNVNCTEVPVAIHADQLTPTWRVYSTGSNVFQTRAGCLIGAEHVNNSYECDIPIGAGICASYQTQTNSPRRARSVASQSIIAYTMSLGAENSVAYSNNSIAIPTNFTISVTTEILPVSMTKTSVDCTMYICGDSTECSNLLLQYGSFCTQLNRALTGIAVEQDKNTQEVFAQVKQIYKTPPIKDFGGFNFSQILPDPSKPSKRSFIEDLLFNKVTLADAGFIKQYGDCLGDIAARDLICAQKFNGLTVLPPLLTDEMIAQYTSALLAGTITSGWTFGAGAALQIPFAMQMAYRFNGIGVTQNVLYENQKLIANQFNSAIGKIQDSLSSTASALGKLQDVVNQNAQALNTLVKQLSSNFGAISSVLNDILSRLDPPEAEVQIDRLITGRLQSLQTYVTQQLIRAAEIRASANLAATKMSECVLGQSKRVDFCGKGYHLMSFPQSAPHGVVFLHVTYVPAQEKNFTTAPAICHDGKAHFPREGVFVSNGTHWFVTQRNFYEPQIITTDNTFVSGNCDVVIGIVNNTVYDPLQPELDSFKEELDKYFKNHTSPDVDLGDISGINASVVNIQKEIDRLNEVAKNLNESLIDLQELGKYEQYIKWPWYIWLGFIAGLIAIVMVTIMLCCMTSCCSCLKGCCSCGSCCKFDEDDSEPVLKGVKLHYT

SEQ ID NO: 341 - protein, 1273 aa, Artificial Sequence
  source: /note="Description of Artificial Sequence: Synthetic polypeptide"
MFVFLVLLPLVSSQCVNLTTRTQLPPAYTNSFTRGVYYPDKVFRSSVLHSTQDLFLPFFSNVTWFHAIHVSGTNGTKRFDNPVLPFNDGVYFASTEKSNIIRGWIFGTTLDSKTQSLLIVNNATNVVIKVCEFQFCNDPFLGVYYHKNNKSWMESEFRVYSSANNCTFEYVSQPFLMDLEGKQGNFKNLREFVFKNIDGYFKIYSKHTPINLVRDLPQGFSALEPLVDLPIGINITRFQTLLALHRSYLTPGDSSSGWTAGAAAYYVGYLQPRTFLLKYNENGTITDAVDCALDPLSETKCTLKSFTVEKGIYQTSNFRVQPTESIVRFPNITNLCPFGEVFNATRFASVYAWNRKRISNCVADYSVLYNSASFSTFKCYGVSPTKLNDLCFTNVYADSFVIRGDEVRQIAPGQTGKIADYNYKLPDDFTGCVIAWNSNNLDSKVGGNYNYLYRLFRKSNLKPFERDISTEIYQAGSTPCNGVEGFNCYFPLQSYGFQPTNGVGYQPYRVVVLSFELLHAPATVCGPKKSTPLVKNKCVNFNFNGLTGTGVLTESNKKFLPFQQFGRDIADTTDAVRDPQTLEILDITPCSFGGVSVITPGTNTSNQVAVLYQNVNCTEVPVAIHADQLTPTWRVYSTGSNVFQTRAGCLIGAEHVNNSYECDIPIGAGICASYQTQTNSPRRARSVASQSIIAYTMSLGAENSVAYSNNSIAIPTNFTISVTTEILPVSMTKTSVDCTMYICGDSTECSNLLLQYGSFCTQLNRALTGIAVEQDKNTQEVFAQVKQIYKTPPIKDFGGFNFSQILPDPSKPSKRSFIEDLLFNKVTLADAGFIKQYGDCLGDIAARDLICAQKFNGLTVLPPLLTDEMIAQYTSALLAGTITSGWTFGAGAALQIPFAMQMAYRFNGIGVTQNVLYENQKLIANQFNSAIGKIQDSLSSTASALGKLQDVVNQNAQALNTLVKQLSSNFGAISSVLNDILSRLDPPEAEVQIDRLITGRLQSLQTYVTQQLIRAAEIRASANLAATKMSECVLGQSKRVDFCGKGYHLMSFPQSAPHGVVFLHVTYVPAQEKNFTTAPAICHDGKAHFPREGVFVSNGTHWFVTQRNFYEPQIITTDNTFVSGNCDVVIGIVNNTVYDPLQPELDSFKEELDKYFKNHTSPDVDLGDISGINASVVNIQKEIDRLNEVAKNLNESLIDLQELGKYEQYIKWPWYIWLGFIAGLIAIVMVTIMLCCMTSCCSCLKGCCSCGSCCKFDEDDSEPVLKGVKLHYT

SEQ ID NO: 342 - protein, 1273 aa, Artificial Sequence
  source: /note="Description of Artificial Sequence: Synthetic polypeptide"
MFVFLVLLPLVSSQCVNLTTRTQLPPAYTNSFTRGVYYPDKVFRSSVLHSTQDLFLPFFSNVTWFHAIHVSGTNGTKRFDNPVLPFNDGVYFASTEKSNIIRGWIFGTTLDSKTQSLLIVNNATNVVIKVCEFQFCNDPFLGVYYHKNNKSWMESEFRVYSSANNCTFEYVSQPFLMDLEGKQGNFKNLREFVFKNIDGYFKIYSKHTPINLVRDLPQGFSALEPLVDLPIGINITRFQTLLALHRSYLTPGDSSSGWTAGAAAYYVGYLQPRTFLLKYNENGTITDAVDCALDPLSETKCTLKSFTVEKGIYQTSNFRVQPTESIVRFPNITNLCPFGEVFNATRFASVYAWNRKRISNCVADYSVLYNSASFSTFKCYGVSPTKLNDLCFTNVYADSFVIRGDEVRQIAPGQTGKIADYNYKLPDDFTGCVIAWNSNNLDSKVGGNYNYLYRLFRKSNLKPFERDISTEIYQAGSTPCNGVEGFNCYFPLQSYGFQPTNGVGYQPYRVVVLSFELLHAPATVCGPKKSTNLVKNKCVNFNFNGLTGTGVLTESNKKFLPFQQFGRDIADTTDAVRDPQTLEILDITPCSFGGVSVITPGTNTSNQVAVLYQNVNCTEVPVAIHADQLTPTWRVYSTGSNVFQTRAGCLIGAEHVNNSYECDIPIGAGICASYQTQTNSPRRARSVASQSIIAYTMSLGAENSVAYSNNSIAIPTNFTISVTTEILPVSMTKTSVDCTMYICGDSTECSNLLLQYGSFCTQLNRALTGIAVEQDKNTQEVFAQVKQIYKTPPIKDFGGFNFSQILPDPSKPSKRSFIEDLLFNKVTLADAGFIKQYGDCLGDIAARDLICAQKFNGLTVLPPLLTDEMIAQYTSALLACTITSGWTCGAGAALQIPFAMQMAYRFNGIGVTQNVLYENQKLIANQFNSAIGKIQDSLSSTASALGKLQDVVNQNAQALNTLVKQLSSNFGAISSVLNDILSRLDPPEAEVQIDRLITGRLQSLQTYVTQQLIRAAEIRASANLAATKMSECVLGQSKRVDFCGKGYHLMSFPQSAPHGVVFLHVTYVPAQEKNFTTAPAICHDGKAHFPREGVFVSNGTHWFVTQRNFYEPQIITTDNTFVSGNCDVVIGIVNNTVYDPLQPELDSFKEELDKYFKNHTSPDVDLGDISGINASVVNIQKEIDRLNEVAKNLNESLIDLQELGKYEQYIKWPWYIWLGFIAGLIAIVMVTIMLCCMTSCCSCLKGCCSCGSCCKFDEDDSEPVLKGVKLHYT

SEQ ID NO: 343 - protein, 1273 aa, Artificial Sequence
  source: /note="Description of Artificial Sequence: Synthetic polypeptide"
MFVFLVLLPLVSSQCVNLTTRTQLPPAYTNSFTRGVYYPDKVFRSSVLHSTQDLFLPFFSNVTWFHAIHVSGTNGTKRFDNPVLPFNDGVYFASTEKSNIIRGWIFGTTLDSKTQSLLIVNNATNVVIKVCEFQFCNDPFLGVYYHKNNKSWMESEFRVYSSANNCTFEYVSQPFLMDLEGKQGNFKNLREFVFKNIDGYFKIYSKHTPINLVRDLPQGFSALEPLVDLPIGINITRFQTLLALHRSYLTPGDSSSGWTAGAAAYYVGYLQPRTFLLKYNENGTITDAVDCALDPLSETKCTLKSFTVEKGIYQTSNFRVQPTESIVRFPNITNLCPFGEVFNATRFASVYAWNRKRISNCVADYSVLYNSASFSTFKCYGVSPTKLNDLCFTNVYADSFVIRGDEVRQIAPGQTGKIADYNYKLPDDFTGCVIAWNSNNLDSKVGGNYNYLYRLFRKSNLKPFERDISTEIYQAGSTPCNGVEGFNCYFPLQSYGFQPTNGVGYQPYRVVVLSFELLHAPATVCGPKKSTNLVKNKCVNFNFNGLTGTGVLTESNKKFLPFQQFGRDIADTTDAVRDPQTLEILDITPCSFGGVSVITPGTNTSNQVAVLYQNVNCTEVPVAIHADQLTPTWRVYSTGSNVFQTRAGCLIGAEHVNNSYECDIPIGAGICASYQTQTNSPRRARSVASQSIIAYTMSLGAENSVAYSNNSIAIPTNFTISVTTEILPVSMTKTSVDCTMYICGDSTECSNLLLQYGSFCTQLNRALTGIAVEQDKNTQEVFAQVKQIYKTPPIKDFGGFNFSQILPDPSKPSKRSFIEDLLFNKVTLADAGFIKQYGDCLGDIAARDLICAQKFNGLTVLPPLLTDEMIAQYTSALLAGTITCGWTFGAGACLQIPFAMQMAYRFNGIGVTQNVLYENQKLIANQFNSAIGKIQDSLSSTASALGKLQDVVNQNAQALNTLVKQLSSNFGAISSVLNDILSRLDPPEAEVQIDRLITGRLQSLQTYVTQQLIRAAEIRASANLAATKMSECVLGQSKRVDFCGKGYHLMSFPQSAPHGVVFLHVTYVPAQEKNFTTAPAICHDGKAHFPREGVFVSNGTHWFVTQRNFYEPQIITTDNTFVSGNCDVVIGIVNNTVYDPLQPELDSFKEELDKYFKNHTSPDVDLGDISGINASVVNIQKEIDRLNEVAKNLNESLIDLQELGKYEQYIKWPWYIWLGFIAGLIAIVMVTIMLCCMTSCCSCLKGCCSCGSCCKFDEDDSEPVLKGVKLHYT

SEQ ID NO: 344 - protein, 1273 aa, Artificial Sequence
  source: /note="Description of Artificial Sequence: Synthetic polypeptide"
MFVFLVLLPLVSSQCVNLTTRTQLPPAYTNSFTRGVYYPDKVFRSSVLHSTQDLFLPFFSNVTWFHAIHVSGTNGTKRFDNPVLPFNDGVYFASTEKSNIIRGWIFGTTLDSKTQSLLIVNNATNVVIKVCEFQFCNDPFLGVYYHKNNKSWMESEFRVYSSANNCTFEYVSQPFLMDLEGKQGNFKNLREFVFKNIDGYFKIYSKHTPINLVRDLPQGFSALEPLVDLPIGINITRFQTLLALHRSYLTPGDSSSGWTAGAAAYYVGYLQPRTFLLKYNENGTITDAVDCALDPLSETKCTLKSFTVEKGIYQTSNFRVQPTESIVRFPNITNLCPFGEVFNATRFASVYAWNRKRISNCVADYSVLYNSASFSTFKCYGVSPTKLNDLCFTNVYADSFVIRGDEVRQIAPGQTGKIADYNYKLPDDFTGCVIAWNSNNLDSKVGGNYNYLYRLFRKSNLKPFERDISTEIYQAGSTPCNGVEGFNCYFPLQSYGFQPTNGVGYQPYRVVVLSFELLHAPATVCGPKKSTPLVKNKCVNFNFNGLTGTGVLTESNKKFLPFQQFGRDIADITDAVRDPQTLEILDITPCSFGGVSVITPGTNTSNQVAVLYQDVNCTEVPVAIHADQLTPTWRVYSTGSNVFQTRAGCLIGAEHVNNSYECDIPIGAGICASYQTQTNSPRRARSVASQSIIAYTMSLGAENSVAYSNNSIAIPTNFTISVTTEILPVSMTKTSVDCTMYICGDSTECSNLLLQYGSFCTQLNRALTGIAVEQDKNTQEVFAQVKQIYKTPPIKDFGGFNFSQILPDPSKPSKRSFIEDLLFNKVTLADAGFIKQYGDCLGDIAARDLICAQKFNGLTVLPPLLTDEMIAQYTSALLAGTITSGWTFGAGAALQIPFAMQMAYRFNGIGVTQNVLYENQKLIANQFNSAIGKIQDSLSSTASALGKLQDVVNQNAQALNTLVKQLSSNFGAISSVLNDILSRLDPPEAEVQIDRLITGRLQSLQTYVTQQLIRAAEIRASANLAATKMSECVLGQSKRVDFCGKGYHLMSFPQSAPHGVVFLHVTYVPAQEKNFTTAPAICHDGKAHFPREGVFVSNGTHWFVTQRNFYEPQIITTDNTFVSGNCDVVIGIVNNTVYDPLQPELDSFKEELDKYFKNHTSPDVDLGDISGINASVVNIQKEIDRLNEVAKNLNESLIDLQELGKYEQYIKWPWYIWLGFIAGLIAIVMVTIMLCCMTSCCSCLKGCCSCGSCCKFDEDDSEPVLKGVKLHYT

SEQ ID NO: 345 - protein, 1273 aa, Artificial Sequence
  source: /note="Description of Artificial Sequence: Synthetic polypeptide"
MFVFLVLLPLVSSQCVNLTTRTQLPPAYTNSFTRGVYYPDKVFRSSVLHSTQDLFLPFFSNVTWFHAIHVSGTNGTKRFDNPVLPFNDGVYFASTEKSNIIRGWIFGTTLDSKTQSLLIVNNATNVVIKVCEFQFCNDPFLGVYYHKNNKSWMESEFRVYSSANNCTFEYVSQPFLMDLEGKQGNFKNLREFVFKNIDGYFKIYSKHTPINLVRDLPQGFSALEPLVDLPIGINITRFQTLLALHRSYLTPGDSSSGWTAGAAAYYVGYLQPRTFLLKYNENGTITDAVDCALDPLSETKCTLKSFTVEKGIYQTSNFRVQPTESIVRFPNITNLCPFGEVFNATRFASVYAWNRKRISNCVADYSVLYNSASFSTFKCYGVSPTKLNDLCFTNVYADSFVIRGDEVRQIAPGQTGKIADYNYKLPDDFTGCVIAWNSNNLDSKVGGNYNYLYRLFRKSNLKPFERDISTEIYQAGSTPCNGVEGFNCYFPLQSYGFQPTNGVGYQPYRVVVLSFELLHAPATVCGPKKSTNLVKNKCVNFNFNGLTGTGVLTESNKKFLPFQQFGRDIADITDAVRDPQTLEILDITPCSFGGVSVITPGTNTSNQVAVLYQDVNCTEVPVAIHADQLTPTWRVYSTGSNVFQTRAGCLIGAEHVNNSYECDIPIGAGICASYQTQTNSPRRARSVASQSIIAYTMSLGAENSVAYSNNSIAIPTNFTISVTTEILPVSMTKTSVDCTMYICGDSTECSNLLLQYGSFCTQLNRALTGIAVEQDKNTQEVFAQVKQIYKTPPIKDFGGFNFSQILPDPSKPSKRSFIEDLLFNKVTLADAGFIKQYGDCLGDIAARDLICAQKFNGLTVLPPLLTDEMIAQYTSALLACTITSGWTCGAGAALQIPFAMQMAYRFNGIGVTQNVLYENQKLIANQFNSAIGKIQDSLSSTASALGKLQDVVNQNAQALNTLVKQLSSNFGAISSVLNDILSRLDPPEAEVQIDRLITGRLQSLQTYVTQQLIRAAEIRASANLAATKMSECVLGQSKRVDFCGKGYHLMSFPQSAPHGVVFLHVTYVPAQEKNFTTAPAICHDGKAHFPREGVFVSNGTHWFVTQRNFYEPQIITTDNTFVSGNCDVVIGIVNNTVYDPLQPELDSFKEELDKYFKNHTSPDVDLGDISGINASVVNIQKEIDRLNEVAKNLNESLIDLQELGKYEQYIKWPWYIWLGFIAGLIAIVMVTIMLCCMTSCCSCLKGCCSCGSCCKFDEDDSEPVLKGVKLHYT

SEQ ID NO: 346 - protein, 1273 aa, Artificial Sequence
  source: /note="Description of Artificial Sequence: Synthetic polypeptide"
MFVFLVLLPLVSSQCVNLTTRTQLPPAYTNSFTRGVYYPDKVFRSSVLHSTQDLFLPFFSNVTWFHAIHVSGTNGTKRFDNPVLPFNDGVYFASTEKSNIIRGWIFGTTLDSKTQSLLIVNNATNVVIKVCEFQFCNDPFLGVYYHKNNKSWMESEFRVYSSANNCTFEYVSQPFLMDLEGKQGNFKNLREFVFKNIDGYFKIYSKHTPINLVRDLPQGFSALEPLVDLPIGINITRFQTLLALHRSYLTPGDSSSGWTAGAAAYYVGYLQPRTFLLKYNENGTITDAVDCALDPLSETKCTLKSFTVEKGIYQTSNFRVQPTESIVRFPNITNLCPFGEVFNATRFASVYAWNRKRISNCVADYSVLYNSASFSTFKCYGVSPTKLNDLCFTNVYADSFVIRGDEVRQIAPGQTGKIADYNYKLPDDFTGCVIAWNSNNLDSKVGGNYNYLYRLFRKSNLKPFERDISTEIYQAGSTPCNGVEGFNCYFPLQSYGFQPTNGVGYQPYRVVVLSFELLHAPATVCGPKKSTNLVKNKCVNFNFNGLTGTGVLTESNKKFLPFQQFGRDIADITDAVRDPQTLEILDITPCSFGGVSVITPGTNTSNQVAVLYQDVNCTEVPVAIHADQLTPTWRVYSTGSNVFQTRAGCLIGAEHVNNSYECDIPIGAGICASYQTQTNSPRRARSVASQSIIAYTMSLGAENSVAYSNNSIAIPTNFTISVTTEILPVSMTKTSVDCTMYICGDSTECSNLLLQYGSFCTQLNRALTGIAVEQDKNTQEVFAQVKQIYKTPPIKDFGGFNFSQILPDPSKPSKRSFIEDLLFNKVTLADAGFIKQYGDCLGDIAARDLICAQKFNGLTVLPPLLTDEMIAQYTSALLAGTITCGWTFGAGACLQIPFAMQMAYRFNGIGVTQNVLYENQKLIANQFNSAIGKIQDSLSSTASALGKLQDVVNQNAQALNTLVKQLSSNFGAISSVLNDILSRLDPPEAEVQIDRLITGRLQSLQTYVTQQLIRAAEIRASANLAATKMSECVLGQSKRVDFCGKGYHLMSFPQSAPHGVVFLHVTYVPAQEKNFTTAPAICHDGKAHFPREGVFVSNGTHWFVTQRNFYEPQIITTDNTFVSGNCDVVIGIVNNTVYDPLQPELDSFKEELDKYFKNHTSPDVDLGDISGINASVVNIQKEIDRLNEVAKNLNESLIDLQELGKYEQYIKWPWYIWLGFIAGLIAIVMVTIMLCCMTSCCSCLKGCCSCGSCCKFDEDDSEPVLKGVKLHYT

SEQ ID NO: 347 - protein, 1273 aa, Artificial Sequence
  source: /note="Description of Artificial Sequence: Synthetic polypeptide"
MFVFLVLLPLVSSQCVNLTTRTQLPPAYTNSFTRGVYYPDKVFRSSVLHSTQDLFLPFFSNVTWFHAIHVSGTNGTKRFDNPVLPFNDGVYFASTEKSNIIRGWIFGTTLDSKTQSLLIVNNATNVVIKVCEFQFCNDPFLGVYYHKNNKSWMESEFRVYSSANNCTFEYVSQPFLMDLEGKQGNFKNLREFVFKNIDGYFKIYSKHTPINLVRDLPQGFSALEPLVDLPIGINITRFQTLLALHRSYLTPGDSSSGWTAGAAAYYVGYLQPRTFLLKYNENGTITDAVDCALDPLSETKCTLKSFTVEKGIYQTSNFRVQPTESIVRFPNITNLCPFGEVFNATRFASVYAWNRKRISNCVADYSVLYNSASFSTFKCYGVSPTKLNDLCFTNVYADSFVIRGDEVRQIAPGQTGKIADYNYKLPDDFTGCVIAWNSNNLDSKVGGNYNYLYRLFRKSNLKPFERDISTEIYQAGSTPCNGVEGFNCYFPLQSYGFQPTNGVGYQPYRVVVLSFELLHAPATVCGPKKSTPLVKNKCVNFNFNGLTGTGVLTESNKKFLPFQQFGRDIADTTDAVRDPQTLEILDITPCSFGGVSVITPGTNTSNQVAVLYQDVNCTEVPVAIHADQLTPTWRVYSTGSNVFQTRAGCLIGAEHVNNSYECDIPIGAGICASYQTQTNSPRRARSVASQSIIAYTMSLGAENSVAYSNNSIAIPTNFTISVTTEILPVSMTKTSVDCTMYICGDSTECSNLLLQYGSFCTQLNRALTGIAVEQDKNTQEVFAQVKQIYKTPPIKDFGGFNFSQILPDPSKPSKRSFIEDLLFNKVTLADAGFIKQYGDCLGDIAARDLICAQKFNGLTVLPPLLTDEMIAQYTSALLACTITSGWTCGAGAALQIPFAMQMAYRFNGIGVTQNVLYENQKLIANQFNSAIGKIQDSLSSTASALGKLQDVVNQNAQALNTLVKQLSSNFGAISSVLNDILSRLDPPEAEVQIDRLITGRLQSLQTYVTQQLIRAAEIRASANLAATKMSECVLGQSKRVDFCGKGYHLMSFPQSAPHGVVFLHVTYVPAQEKNFTTAPAICHDGKAHFPREGVFVSNGTHWFVTQRNFYEPQIITTDNTFVSGNCDVVIGIVNNTVYDPLQPELDSFKEELDKYFKNHTSPDVDLGDISGINASVVNIQKEIDRLNEVAKNLNESLIDLQELGKYEQYIKWPWYIWLGFIAGLIAIVMVTIMLCCMTSCCSCLKGCCSCGSCCKFDEDDSEPVLKGVKLHYT

SEQ ID NO: 348 - protein, 1273 aa, Artificial Sequence
  source: /note="Description of Artificial Sequence: Synthetic polypeptide"
MFVFLVLLPLVSSQCVNLTTRTQLPPAYTNSFTRGVYYPDKVFRSSVLHSTQDLFLPFFSNVTWFHAIHVSGTNGTKRFDNPVLPFNDGVYFASTEKSNIIRGWIFGTTLDSKTQSLLIVNNATNVVIKVCEFQFCNDPFLGVYYHKNNKSWMESEFRVYSSANNCTFEYVSQPFLMDLEGKQGNFKNLREFVFKNIDGYFKIYSKHTPINLVRDLPQGFSALEPLVDLPIGINITRFQTLLALHRSYLTPGDSSSGWTAGAAAYYVGYLQPRTFLLKYNENGTITDAVDCALDPLSETKCTLKSFTVEKGIYQTSNFRVQPTESIVRFPNITNLCPFGEVFNATRFASVYAWNRKRISNCVADYSVLYNSASFSTFKCYGVSPTKLNDLCFTNVYADSFVIRGDEVRQIAPGQTGKIADYNYKLPDDFTGCVIAWNSNNLDSKVGGNYNYLYRLFRKSNLKPFERDISTEIYQAGSTPCNGVEGFNCYFPLQSYGFQPTNGVGYQPYRVVVLSFELLHAPATVCGPKKSTPLVKNKCVNFNFNGLTGTGVLTESNKKFLPFQQFGRDIADTTDAVRDPQTLEILDITPCSFGGVSVITPGTNTSNQVAVLYQDVNCTEVPVAIHADQLTPTWRVYSTGSNVFQTRAGCLIGAEHVNNSYECDIPIGAGICASYQTQTNSPRRARSVASQSIIAYTMSLGAENSVAYSNNSIAIPTNFTISVTTEILPVSMTKTSVDCTMYICGDSTECSNLLLQYGSFCTQLNRALTGIAVEQDKNTQEVFAQVKQIYKTPPIKDFGGFNFSQILPDPSKPSKRSFIEDLLFNKVTLADAGFIKQYGDCLGDIAARDLICAQKFNGLTVLPPLLTDEMIAQYTSALLAGTITCGWTFGAGACLQIPFAMQMAYRFNGIGVTQNVLYENQKLIANQFNSAIGKIQDSLSSTASALGKLQDVVNQNAQALNTLVKQLSSNFGAISSVLNDILSRLDPPEAEVQIDRLITGRLQSLQTYVTQQLIRAAEIRASANLAATKMSECVLGQSKRVDFCGKGYHLMSFPQSAPHGVVFLHVTYVPAQEKNFTTAPAICHDGKAHFPREGVFVSNGTHWFVTQRNFYEPQIITTDNTFVSGNCDVVIGIVNNTVYDPLQPELDSFKEELDKYFKNHTSPDVDLGDISGINASVVNIQKEIDRLNEVAKNLNESLIDLQELGKYEQYIKWPWYIWLGFIAGLIAIVMVTIMLCCMTSCCSCLKGCCSCGSCCKFDEDDSEPVLKGVKLHYT

SEQ ID NO: 349 - protein, 1273 aa, Artificial Sequence; identical to SEQ ID NO: 222
  source: /note="Description of Artificial Sequence: Synthetic polypeptide"

SEQ ID NO: 350 - protein, 1273 aa, Artificial Sequence
  source: /note="Description of Artificial Sequence: Synthetic polypeptide"
MFVFLVLLPLVSSQCVNLTTRTQLPPAYTNSFTRGVYYPDKVFRSSVLHSTQDLFLPFFSNVTWFHAIHVSGTNGTKRFDNPVLPFNDGVYFASTEKSNIIRGWIFGTTLDSKTQSLLIVNNATNVVIKVCEFQFCNDPFLGVYYHKNNKSWMESEFRVYSSANNCTFEYVSQPFLMDLEGKQGNFKNLREFVFKNIDGYFKIYSKHTPINLVRDLPQGFSALEPLVDLPIGINITRFQTLLALHRSYLTPGDSSSGWTAGAAAYYVGYLQPRTFLLKYNENGTITDAVDCALDPLSETKCTLKSFTVEKGIYQTSNFRVQPTESIVRFPNITNLCPFGEVFNATRFASVYAWNRKRISNCVADYSVLYNSASFSTFKCYGVSPTKLNDLCFTNVYADSFVIRGDEVRQIAPGQTGKIADYNYKLPDDFTGCVIAWNSNNLDSKVGGNYNYLYRLFRKSNLKPFERDISTEIYQAGSTPCNGVEGFNCYFPLQSYGFQPTNGVGYQPYRVVVLSFELLHAPATVCGPKKSTNLVKNKCVNFNFNGLTGTGVLTESNKKFLPFQQFGRDIADITDAVRDPQTLEILDITPCSFGGVSVITPGTNTSNQVAVLYQDVNCTEVPVAIHADQLTPTWRVYSTGSNVFQTRAGCLIGAEHVNNSYECDIPIGAGICASYQTQTNSPRRARSVASQSIIAYTMSLGAENSVAYSNNSIAIPTNFTISVTTEILPVSMTKTSVDCTMYICGDSTECSNLLLQYGSFCTQLNRALTGIAVEQDKNTQEVFAQVKQIYKTPPIKDFGGFNFSQILPDPSKPSKRSFIEDLLFNKVTLADAGFIKQYGDCLGDIAARDLICAQKFNGLTVLPPLLTDEMIAQYTSALLAGTITSGWTFGAGPALQIPFAMQMAYRFNGIGVTQNVLYENQKLIANQFNSAIGKIQDSLSSTPSALGKLQDVVNQNAQALNTLVKQLSSNFGAISSVLNDILSRLDPPEAEVQIDRLITGRLQSLQTYVTQQLIRAAEIRASANLAATKMSECVLGQSKRVDFCGKGYHLMSFPQSAPHGVVFLHVTYVPAQEKNFTTAPAICHDGKAHFPREGVFVSNGTHWFVTQRNFYEPQIITTDNTFVSGNCDVVIGIVNNTVYDPLQPELDSFKEELDKYFKNHTSPDVDLGDISGINASVVNIQKEIDRLNEVAKNLNESLIDLQELGKYEQYIKWPWYIWLGFIAGLIAIVMVTIMLCCMTSCCSCLKGCCSCGSCCKFDEDDSEPVLKGVKLHYT

SEQ ID NO: 351 - protein, 1273 aa, Artificial Sequence
  source: /note="Description of Artificial Sequence: Synthetic polypeptide"
MFVFLVLLPLVSSQCVNLTTRTQLPPAYTNSFTRGVYYPDKVFRSSVLHSTQDLFLPFFSNVTWFHAIHVSGTNGTKRFDNPVLPFNDGVYFASTEKSNIIRGWIFGTTLDSKTQSLLIVNNATNVVIKVCEFQFCNDPFLGVYYHKNNKSWMESEFRVYSSANNCTFEYVSQPFLMDLEGKQGNFKNLREFVFKNIDGYFKIYSKHTPINLVRDLPQGFSALEPLVDLPIGINITRFQTLLALHRSYLTPGDSSSGWTAGAAAYYVGYLQPRTFLLKYNENGTITDAVDCALDPLSETKCTLKSFTVEKGIYQTSNFRVQPTESIVRFPNITNLCPFGEVFNATRFASVYAWNRKRISNCVADYSVLYNSASFSTFKCYGVSPTKLNDLCFTNVYADSFVIRGDEVRQIAPGQTGKIADYNYKLPDDFTGCVIAWNSNNLDSKVGGNYNYLYRLFRKSNLKPFERDISTEIYQAGSTPCNGVEGFNCYFPLQSYGFQPTNGVGYQPYRVVVLSFELLHAPATVCGPKKSTPLVKNKCVNFNFNGLTGTGVLTESNKKFLPFQQFGRDIADTTDAVRDPQTLEILDITPCSFGGVSVITPGTNTSNQVAVLYQDVNCTEVPVAIHADQLTPTWRVYSTGSNVFQTRAGCLIGAEHVNNSYECDIPIGAGICASYQTQTNSPRRARSVASQSIIAYTMSLGAENSVAYSNNSIAIPTNFTISVTTEILPVSMTKTSVDCTMYICGDSTECSNLLLQYGSFCTQLNRALTGIAVEQDKNTQEVFAQVKQIYKTPPIKDFGGFNFSQILPDPSKPSKRSFIEDLLFNKVTLADAGFIKQYGDCLGDIAARDLICAQKFNGLTVLPPLLTDEMIAQYTSALLAGTITSGWTFGAGPALQIPFAMQMAYRFNGIGVTQNVLYENQKLIANQFNSAIGKIQDSLSSTPSALGKLQDVVNQNAQALNTLVKQLSSNFGAISSVLNDILSRLDPPEAEVQIDRLITGRLQSLQTYVTQQLIRAAEIRASANLAATKMSECVLGQSKRVDFCGKGYHLMSFPQSAPHGVVFLHVTYVPAQEKNFTTAPAICHDGKAHFPREGVFVSNGTHWFVTQRNFYEPQIITTDNTFVSGNCDVVIGIVNNTVYDPLQPELDSFKEELDKYFKNHTSPDVDLGDISGINASVVNIQKEIDRLNEVAKNLNESLIDLQELGKYEQYIKWPWYIWLGFIAGLIAIVMVTIMLCCMTSCCSCLKGCCSCGSCCKFDEDDSEPVLKGVKLHYT

SEQ ID NO: 352 - protein, 1273 aa, Artificial Sequence
  source: /note="Description of Artificial Sequence: Synthetic polypeptide"
MFVFLVLLPLVSSQCVNLTTRTQLPPAYTNSFTRGVYYPDKVFRSSVLHSTQDLFLPFFSNVTWFHAIHVSGTNGTKRFDNPVLPFNDGVYFASTEKSNIIRGWIFGTTLDSKTQSLLIVNNATNVVIKVCEFQFCNDPFLGVYYHKNNKSWMESEFRVYSSANNCTFEYVSQPFLMDLEGKQGNFKNLREFVFKNIDGYFKIYSKHTPINLVRDLPQGFSALEPLVDLPIGINITRFQTLLALHRSYLTPGDSSSGWTAGAAAYYVGYLQPRTFLLKYNENGTITDAVDCALDPLSETKCTLKSFTVEKGIYQTSNFRVQPTESIVRFPNITNLCPFGEVFNATRFASVYAWNRKRISNCVADYSVLYNSASFSTFKCYGVSPTKLNDLCFTNVYADSFVIRGDEVRQIAPGQTGKIADYNYKLPDDFTGCVIAWNSNNLDSKVGGNYNYLYRLFRKSNLKPFERDISTEIYQAGSTPCNGVEGFNCYFPLQSYGFQPTNGVGYQPYRVVVLSFELLHAPATVCGPKKSTNLVKNKCVNFNFNGLTGTGVLTESNKKFLPFQQFGRDIADTTDAVRDPQTLEILDITPCSFGGVSVITPGTNTSNQVAVLYQDVNCTEVPVAIHADQLTPTWRVYSTGSNVFQTRAGCLIGAEHVNNSYECDIPIGAGICASYQTQTNSPRRARSVASQSIIAYTMSLGAENSVAYSNNSIAIPTNFTISVTTEILPVSMTKTSVDCTMYICGDSTECSNLLLQYGSFCTQLNRALTGIAVEQDKNTQEVFAQVKQIYKTPPIKDFGGFNFSQILPDPSKPSKRSFIEDLLFNKVTLADAGFIKQYGDCLGDIAARDLICAQKFNGLTVLPPLLTDEMIAQYTSALLACTITSGWTCGAGPALQIPFAMQMAYRFNGIGVTQNVLYENQKLIANQFNSAIGKIQDSLSSTPSALGKLQDVVNQNAQALNTLVKQLSSNFGAISSVLNDILSRLDPPEAEVQIDRLITGRLQSLQTYVTQQLIRAAEIRASANLAATKMSECVLGQSKRVDFCGKGYHLMSFPQSAPHGVVFLHVTYVPAQEKNFTTAPAICHDGKAHFPREGVFVSNGTHWFVTQRNFYEPQIITTDNTFVSGNCDVVIGIVNNTVYDPLQPELDSFKEELDKYFKNHTSPDVDLGDISGINASVVNIQKEIDRLNEVAKNLNESLIDLQELGKYEQYIKWPWYIWLGFIAGLIAIVMVTIMLCCMTSCCSCLKGCCSCGSCCKFDEDDSEPVLKGVKLHYT

SEQ ID NO: 353 - protein, 1273 aa, Artificial Sequence
  source: /note="Description of Artificial Sequence: Synthetic polypeptide"
MFVFLVLLPLVSSQCVNLTTRTQLPPAYTNSFTRGVYYPDKVFRSSVLHSTQDLFLPFFSNVTWFHAIHVSGTNGTKRFDNPVLPFNDGVYFASTEKSNIIRGWIFGTTLDSKTQSLLIVNNATNVVIKVCEFQFCNDPFLGVYYHKNNKSWMESEFRVYSSANNCTFEYVSQPFLMDLEGKQGNFKNLREFVFKNIDGYFKIYSKHTPINLVRDLPQGFSALEPLVDLPIGINITRFQTLLALHRSYLTPGDSSSGWTAGAAAYYVGYLQPRTFLLKYNENGTITDAVDCALDPLSETKCTLKSFTVEKGIYQTSNFRVQPTESIVRFPNITNLCPFGEVFNATRFASVYAWNRKRISNCVADYSVLYNSASFSTFKCYGVSPTKLNDLCFTNVYADSFVIRGDEVRQIAPGQTGKIADYNYKLPDDFTGCVIAWNSNNLDSKVGGNYNYLYRLFRKSNLKPFERDISTEIYQAGSTPCNGVEGFNCYFPLQSYGFQPTNGVGYQPYRVVVLSFELLHAPATVCGPKKSTNLVKNKCVNFNFNGLTGTGVLTESNKKFLPFQQFGRDIADTTDAVRDPQTLEILDITPCSFGGVSVITPGTNTSNQVAVLYQDVNCTEVPVAIHADQLTPTWRVYSTGSNVFQTRAGCLIGAEHVNNSYECDIPIGAGICASYQTQTNSPRRARSVASQSIIAYTMSLGAENSVAYSNNSIAIPTNFTISVTTEILPVSMTKTSVDCTMYICGDSTECSNLLLQYGSFCTQLNRALTGIAVEQDKNTQEVFAQVKQIYKTPPIKDFGGFNFSQILPDPSKPSKRSFIEDLLFNKVTLADAGFIKQYGDCLGDIAARDLICAQKFNGLTVLPPLLTDEMIAQYTSALLAGTITCGWTFGAGPCLQIPFAMQMAYRFNGIGVTQNVLYENQKLIANQFNSAIGKIQDSLSSTPSALGKLQDVVNQNAQALNTLVKQLSSNFGAISSVLNDILSRLDPPEAEVQIDRLITGRLQSLQTYVTQQLIRAAEIRASANLAATKMSECVLGQSKRVDFCGKGYHLMSFPQSAPHGVVFLHVTYVPAQEKNFTTAPAICHDGKAHFPREGVFVSNGTHWFVTQRNFYEPQIITTDNTFVSGNCDVVIGIVNNTVYDPLQPELDSFKEELDKYFKNHTSPDVDLGDISGINASVVNIQKEIDRLNEVAKNLNESLIDLQELGKYEQYIKWPWYIWLGFIAGLIAIVMVTIMLCCMTSCCSCLKGCCSCGSCCKFDEDDSEPVLKGVKLHYT

SEQ ID NO: 354 - protein, 1273 aa, Artificial Sequence
  source: /note="Description of Artificial Sequence: Synthetic polypeptide"
MFVFLVLLPLVSSQCVNLTTRTQLPPAYTNSFTRGVYYPDKVFRSSVLHSTQDLFLPFFSNVTWFHAIHVSGTNGTKRFDNPVLPFNDGVYFASTEKSNIIRGWIFGTTLDSKTQSLLIVNNATNVVIKVCEFQFCNDPFLGVYYHKNNKSWMESEFRVYSSANNCTFEYVSQPFLMDLEGKQGNFKNLREFVFKNIDGYFKIYSKHTPINLVRDLPQGFSALEPLVDLPIGINITRFQTLLALHRSYLTPGDSSSGWTAGAAAYYVGYLQPRTFLLKYNENGTITDAVDCALDPLSETKCTLKSFTVEKGIYQTSNFRVQPTESIVRFPNITNLCPFGEVFNATRFASVYAWNRKRISNCVADYSVLYNSASFSTFKCYGVSPTKLNDLCFTNVYADSFVIRGDEVRQIAPGQTGKIADYNYKLPDDFTGCVIAWNSNNLDSKVGGNYNYLYRLFRKSNLKPFERDISTEIYQAGSTPCNGVEGFNCYFPLQSYGFQPTNGVGYQPYRVVVLSFELLHAPATVCGPKKSTNLVKNKCVNFNFNGLTGTGVLTESNKKFLPFQQFGRDIADITDAVRDPQTLEILDITPCSFGGVSVITPGTNTSNQVAVLYQNVNCTEVPVAIHADQLTPTWRVYSTGSNVFQTRAGCLIGAEHVNNSYECDIPIGAGICASYQTQTNSPRRARSVASQSIIAYTMSLGAENSVAYSNNSIAIPTNFTISVTTEILPVSMTKTSVDCTMYICGDSTECSNLLLQYGSFCTQLNRALTGIAVEQDKNTQEVFAQVKQIYKTPPIKDFGGFNFSQILPDPSKPSKRSFIEDLLFNKVTLADAGFIKQYGDCLGDIAARDLICAQKFNGLTVLPPLLTDEMIAQYTSALLAGTITSGWTFGAGAALQIPFAMQMAYRFNGIGVTQNVLYENQKLIANQFNSAIGKIQDSLSSTPSALGKLQDVVNQNAQALNTLVKQLSSNFGAISSVLNDILSRLDPPEAEVQIDRLITGRLQSLQTYVTQQLIRAAEIRASANLAATKMSECVLGQSKRVDFCGKGYHLMSFPQSAPHGVVFLHVTYVPAQEKNFTTAPAICHDGKAHFPREGVFVSNGTHWFVTQRNFYEPQIITTDNTFVSGNCDVVIGIVNNTVYDPLQPELDSFKEELDKYFKNHTSPDVDLGDISGINASVVNIQKEIDRLNEVAKNLNESLIDLQELGKYEQYIKWPWYIWLGFIAGLIAIVMVTIMLCCMTSCCSCLKGCCSCGSCCKFDEDDSEPVLKGVKLHYT

SEQ ID NO: 355 - protein, 1273 aa, Artificial Sequence
  source: /note="Description of Artificial Sequence: Synthetic polypeptide"
MFVFLVLLPLVSSQCVNLTTRTQLPPAYTNSFTRGVYYPDKVFRSSVLHSTQDLFLPFFSNVTWFHAIHVSGTNGTKRFDNPVLPFNDGVYFASTEKSNIIRGWIFGTTLDSKTQSLLIVNNATNVVIKVCEFQFCNDPFLGVYYHKNNKSWMESEFRVYSSANNCTFEYVSQPFLMDLEGKQGNFKNLREFVFKNIDGYFKIYSKHTPINLVRDLPQGFSALEPLVDLPIGINITRFQTLLALHRSYLTPGDSSSGWTAGAAAYYVGYLQPRTFLLKYNENGTITDAVDCALDPLSETKCTLKSFTVEKGIYQTSNFRVQPTESIVRFPNITNLCPFGEVFNATRFASVYAWNRKRISNCVADYSVLYNSASFSTFKCYGVSPTKLNDLCFTNVYADSFVIRGDEVRQIAPGQTGKIADYNYKLPDDFTGCVIAWNSNNLDSKVGGNYNYLYRLFRKSNLKPFERDISTEIYQAGSTPCNGVEGFNCYFPLQSYGFQPTNGVGYQPYRVVVLSFELLHAPATVCGPKKSTPLVKNKCVNFNFNGLTGTGVLTESNKKFLPFQQFGRDIADTTDAVRDPQTLEILDITPCSFGGVSVITPGTNTSNQVAVLYQNVNCTEVPVAIHADQLTPTWRVYSTGSNVFQTRAGCLIGAEHVNNSYECDIPIGAGICASYQTQTNSPRRARSVASQSIIAYTMSLGAENSVAYSNNSIAIPTNFTISVTTEILPVSMTKTSVDCTMYICGDSTECSNLLLQYGSFCTQLNRALTGIAVEQDKNTQEVFAQVKQIYKTPPIKDFGGFNFSQILPDPSKPSKRSFIEDLLFNKVTLADAGFIKQYGDCLGDIAARDLICAQKFNGLTVLPPLLTDEMIAQYTSALLAGTITSGWTFGAGAALQIPFAMQMAYRFNGIGVTQNVLYENQKLIANQFNSAIGKIQDSLSSTPSALGKLQDVVNQNAQALNTLVKQLSSNFGAISSVLNDILSRLDPPEAEVQIDRLITGRLQSLQTYVTQQLIRAAEIRASANLAATKMSECVLGQSKRVDFCGKGYHLMSFPQSAPHGVVFLHVTYVPAQEKNFTTAPAICHDGKAHFPREGVFVSNGTHWFVTQRNFYEPQIITTDNTFVSGNCDVVIGIVNNTVYDPLQPELDSFKEELDKYFKNHTSPDVDLGDISGINASVVNIQKEIDRLNEVAKNLNESLIDLQELGKYEQYIKWPWYIWLGFIAGLIAIVMVTIMLCCMTSCCSCLKGCCSCGSCCKFDEDDSEPVLKGVKLHYT

SEQ ID NO: 356 - protein, 1273 aa, Artificial Sequence
  source: /note="Description of Artificial Sequence: Synthetic polypeptide"
MFVFLVLLPLVSSQCVNLTTRTQLPPAYTNSFTRGVYYPDKVFRSSVLHSTQDLFLPFFSNVTWFHAIHVSGTNGTKRFDNPVLPFNDGVYFASTEKSNIIRGWIFGTTLDSKTQSLLIVNNATNVVIKVCEFQFCNDPFLGVYYHKNNKSWMESEFRVYSSANNCTFEYVSQPFLMDLEGKQGNFKNLREFVFKNIDGYFKIYSKHTPINLVRDLPQGFSALEPLVDLPIGINITRFQTLLALHRSYLTPGDSSSGWTAGAAAYYVGYLQPRTFLLKYNENGTITDAVDCALDPLSETKCTLKSFTVEKGIYQTSNFRVQPTESIVRFPNITNLCPFGEVFNATRFASVYAWNRKRISNCVADYSVLYNSASFSTFKCYGVSPTKLNDLCFTNVYADSFVIRGDEVRQIAPGQTGKIADYNYKLPDDFTGCVIAWNSNNLDSKVGGNYNYLYRLFRKSNLKPFERDISTEIYQAGSTPCNGVEGFNCYFPLQSYGFQPTNGVGYQPYRVVVLSFELLHAPATVCGPKKSTNLVKNKCVNFNFNGLTGTGVLTESNKKFLPFQQFGRDIADTTDAVRDPQTLEILDITPCSFGGVSVITPGTNTSNQVAVLYQNVNCTEVPVAIHADQLTPTWRVYSTGSNVFQTRAGCLIGAEHVNNSYECDIPIGAGICASYQTQTNSPRRARSVASQSIIAYTMSLGAENSVAYSNNSIAIPTNFTISVTTEILPVSMTKTSVDCTMYICGDSTECSNLLLQYGSFCTQLNRALTGIAVEQDKNTQEVFAQVKQIYKTPPIKDFGGFNFSQILPDPSKPSKRSFIEDLLFNKVTLADAGFIKQYGDCLGDIAARDLICAQKFNGLTVLPPLLTDEMIAQYTSALLACTITSGWTCGAGAALQIPFAMQMAYRFNGIGVTQNVLYENQKLIANQFNSAIGKIQDSLSSTPSALGKLQDVVNQNAQALNTLVKQLSSNFGAISSVLNDILSRLDPPEAEVQIDRLITGRLQSLQTYVTQQLIRAAEIRASANLAATKMSECVLGQSKRVDFCGKGYHLMSFPQSAPHGVVFLHVTYVPAQEKNFTTAPAICHDGKAHFPREGVFVSNGTHWFVTQRNFYEPQIITTDNTFVSGNCDVVIGIVNNTVYDPLQPELDSFKEELDKYFKNHTSPDVDLGDISGINASVVNIQKEIDRLNEVAKNLNESLIDLQELGKYEQYIKWPWYIWLGFIAGLIAIVMVTIMLCCMTSCCSCLKGCCSCGSCCKFDEDDSEPVLKGVKLHYT

SEQ ID NO: 357 - protein, 1273 aa, Artificial Sequence
  source: /note="Description of Artificial Sequence: Synthetic polypeptide"
MFVFLVLLPLVSSQCVNLTTRTQLPPAYTNSFTRGVYYPDKVFRSSVLHSTQDLFLPFFSNVTWFHAIHVSGTNGTKRFDNPVLPFNDGVYFASTEKSNIIRGWIFGTTLDSKTQSLLIVNNATNVVIKVCEFQFCNDPFLGVYYHKNNKSWMESEFRVYSSANNCTFEYVSQPFLMDLEGKQGNFKNLREFVFKNIDGYFKIYSKHTPINLVRDLPQGFSALEPLVDLPIGINITRFQTLLALHRSYLTPGDSSSGWTAGAAAYYVGYLQPRTFLLKYNENGTITDAVDCALDPLSETKCTLKSFTVEKGIYQTSNFRVQPTESIVRFPNITNLCPFGEVFNATRFASVYAWNRKRISNCVADYSVLYNSASFSTFKCYGVSPTKLNDLCFTNVYADSFVIRGDEVRQIAPGQTGKIADYNYKLPDDFTGCVIAWNSNNLDSKVGGNYNYLYRLFRKSNLKPFERDISTEIYQAGSTPCNGVEGFNCYFPLQSYGFQPTNGVGYQPYRVVVLSFELLHAPATVCGPKKSTNLVKNKCVNFNFNGLTGTGVLTESNKKFLPFQQFGRDIADTTDAVRDPQTLEILDITPCSFGGVSVITPGTNTSNQVAVLYQNVNCTEVPVAIHADQLTPTWRVYSTGSNVFQTRAGCLIGAEHVNNSYECDIPIGAGICASYQTQTNSPRRARSVASQSIIAYTMSLGAENSVAYSNNSIAIPTNFTISVTTEILPVSMTKTSVDCTMYICGDSTECSNLLLQYGSFCTQLNRALTGIAVEQDKNTQEVFAQVKQIYKTPPIKDFGGFNFSQILPDPSKPSKRSFIEDLLFNKVTLADAGFIKQYGDCLGDIAARDLICAQKFNGLTVLPPLLTDEMIAQYTSALLAGTITCGWTFGAGACLQIPFAMQMAYRFNGIGVTQNVLYENQKLIANQFNSAIGKIQDSLSSTPSALGKLQDVVNQNAQALNTLVKQLSSNFGAISSVLNDILSRLDPPEAEVQIDRLITGRLQSLQTYVTQQLIRAAEIRASANLAATKMSECVLGQSKRVDFCGKGYHLMSFPQSAPHGVVFLHVTYVPAQEKNFTTAPAICHDGKAHFPREGVFVSNGTHWFVTQRNFYEPQIITTDNTFVSGNCDVVIGIVNNTVYDPLQPELDSFKEELDKYFKNHTSPDVDLGDISGINASVVNIQKEIDRLNEVAKNLNESLIDLQELGKYEQYIKWPWYIWLGFIAGLIAIVMVTIMLCCMTSCCSCLKGCCSCGSCCKFDEDDSEPVLKGVKLHYT

SEQ ID NO: 358 - protein, 1273 aa, Artificial Sequence
  source: /note="Description of Artificial Sequence: Synthetic polypeptide"
MFVFLVLLPLVSSQCVNLTTRTQLPPAYTNSFTRGVYYPDKVFRSSVLHSTQDLFLPFFSNVTWFHAIHVSGTNGTKRFDNPVLPFNDGVYFASTEKSNIIRGWIFGTTLDSKTQSLLIVNNATNVVIKVCEFQFCNDPFLGVYYHKNNKSWMESEFRVYSSANNCTFEYVSQPFLMDLEGKQGNFKNLREFVFKNIDGYFKIYSKHTPINLVRDLPQGFSALEPLVDLPIGINITRFQTLLALHRSYLTPGDSSSGWTAGAAAYYVGYLQPRTFLLKYNENGTITDAVDCALDPLSETKCTLKSFTVEKGIYQTSNFRVQPTESIVRFPNITNLCPFGEVFNATRFASVYAWNRKRISNCVADYSVLYNSASFSTFKCYGVSPTKLNDLCFTNVYADSFVIRGDEVRQIAPGQTGKIADYNYKLPDDFTGCVIAWNSNNLDSKVGGNYNYLYRLFRKSNLKPFERDISTEIYQAGSTPCNGVEGFNCYFPLQSYGFQPTNGVGYQPYRVVVLSFELLHAPATVCGPKKSTPLVKNKCVNFNFNGLTGTGVLTESNKKFLPFQQFGRDIADITDAVRDPQTLEILDITPCSFGGVSVITPGTNTSNQVAVLYQDVNCTEVPVAIHADQLTPTWRVYSTGSNVFQTRAGCLIGAEHVNNSYECDIPIGAGICASYQTQTNSPRRARSVASQSIIAYTMSLGAENSVAYSNNSIAIPTNFTISVTTEILPVSMTKTSVDCTMYICGDSTECSNLLLQYGSFCTQLNRALTGIAVEQDKNTQEVFAQVKQIYKTPPIKDFGGFNFSQILPDPSKPSKRSFIEDLLFNKVTLADAGFIKQYGDCLGDIAARDLICAQKFNGLTVLPPLLTDEMIAQYTSALLAGTITSGWTFGAGAALQIPFAMQMAYRFNGIGVTQNVLYENQKLIANQFNSAIGKIQDSLSSTPSALGKLQDVVNQNAQALNTLVKQLSSNFGAISSVLNDILSRLDPPEAEVQIDRLITGRLQSLQTYVTQQLIRAAEIRASANLAATKMSECVLGQSKRVDFCGKGYHLMSFPQSAPHGVVFLHVTYVPAQEKNFTTAPAICHDGKAHFPREGVFVSNGTHWFVTQRNFYEPQIITTDNTFVSGNCDVVIGIVNNTVYDPLQPELDSFKEELDKYFKNHTSPDVDLGDISGINASVVNIQKEIDRLNEVAKNLNESLIDLQELGKYEQYIKWPWYIWLGFIAGLIAIVMVTIMLCCMTSCCSCLKGCCSCGSCCKFDEDDSEPVLKGVKLHYT

SEQ ID NO: 359 - protein, 1273 aa, Artificial Sequence
  source: /note="Description of Artificial Sequence: Synthetic polypeptide"
MFVFLVLLPLVSSQCVNLTTRTQLPPAYTNSFTRGVYYPDKVFRSSVLHSTQDLFLPFFSNVTWFHAIHVSGTNGTKRFDNPVLPFNDGVYFASTEKSNIIRGWIFGTTLDSKTQSLLIVNNATNVVIKVCEFQFCNDPFLGVYYHKNNKSWMESEFRVYSSANNCTFEYVSQPFLMDLEGKQGNFKNLREFVFKNIDGYFKIYSKHTPINLVRDLPQGFSALEPLVDLPIGINITRFQTLLALHRSYLTPGDSSSGWTAGAAAYYVGYLQPRTFLLKYNENGTITDAVDCALDPLSETKCTLKSFTVEKGIYQTSNFRVQPTESIVRFPNITNLCPFGEVFNATRFASVYAWNRKRISNCVADYSVLYNSASFSTFKCYGVSPTKLNDLCFTNVYADSFVIRGDEVRQIAPGQTGKIADYNYKLPDDFTGCVIAWNSNNLDSKVGGNYNYLYRLFRKSNLKPFERDISTEIYQAGSTPCNGVEGFNCYFPLQSYGFQPTNGVGYQPYRVVVLSFELLHAPATVCGPKKSTNLVKNKCVNFNFNGLTGTGVLTESNKKFLPFQQFGRDIADITDAVRDPQTLEILDITPCSFGGVSVITPGTNTSNQVAVLYQDVNCTEVPVAIHADQLTPTWRVYSTGSNVFQTRAGCLIGAEHVNNSYECDIPIGAGICASYQTQTNSPRRARSVASQSIIAYTMSLGAENSVAYSNNSIAIPTNFTISVTTEILPVSMTKTSVDCTMYICGDSTECSNLLLQYGSFCTQLNRALTGIAVEQDKNTQEVFAQVKQIYKTPPIKDFGGFNFSQILPDPSKPSKRSFIEDLLFNKVTLADAGFIKQYGDCLGDIAARDLICAQKFNGLTVLPPLLTDEMIAQYTSALLACTITSGWTCGAGAALQIPFAMQMAYRFNGIGVTQNVLYENQKLIANQFNSAIGKIQDSLSSTPSALGKLQDVVNQNAQALNTLVKQLSSNFGAISSVLNDILSRLDPPEAEVQIDRLITGRLQSLQTYVTQQLIRAAEIRASANLAATKMSECVLGQSKRVDFCGKGYHLMSFPQSAPHGVVFLHVTYVPAQEKNFTTAPAICHDGKAHFPREGVFVSNGTHWFVTQRNFYEPQIITTDNTFVSGNCDVVIGIVNNTVYDPLQPELDSFKEELDKYFKNHTSPDVDLGDISGINASVVNIQKEIDRLNEVAKNLNESLIDLQELGKYEQYIKWPWYIWLGFIAGLIAIVMVTIMLCCMTSCCSCLKGCCSCGSCCKFDEDDSEPVLKGVKLHYT

SEQ ID NO: 360 - protein, 1273 aa, Artificial Sequence
  source: /note="Description of Artificial Sequence: Synthetic polypeptide"
MFVFLVLLPLVSSQCVNLTTRTQLPPAYTNSFTRGVYYPDKVFRSSVLHSTQDLFLPFFSNVTWFHAIHVSGTNGTKRFDNPVLPFNDGVYFASTEKSNIIRGWIFGTTLDSKTQSLLIVNNATNVVIKVCEFQFCNDPFLGVYYHKNNKSWMESEFRVYSSANNCTFEYVSQPFLMDLEGKQGNFKNLREFVFKNIDGYFKIYSKHTPINLVRDLPQGFSALEPLVDLPIGINITRFQTLLALHRSYLTPGDSSSGWTAGAAAYYVGYLQPRTFLLKYNENGTITDAVDCALDPLSETKCTLKSFTVEKGIYQTSNFRVQPTESIVRFPNITNLCPFGEVFNATRFASVYAWNRKRISNCVADYSVLYNSASFSTFKCYGVSPTKLNDLCFTNVYADSFVIRGDEVRQIAPGQTGKIADYNYKLPDDFTGCVIAWNSNNLDSKVGGNYNYLYRLFRKSNLKPFERDISTEIYQAGSTPCNGVEGFNCYFPLQSYGFQPTNGVGYQPYRVVVLSFELLHAPATVCGPKKSTNLVKNKCVNFNFNGLTGTGVLTESNKKFLPFQQFGRDIADITDAVRDPQTLEILDITPCSFGGVSVITPGTNTSNQVAVLYQDVNCTEVPVAIHADQLTPTWRVYSTGSNVFQTRAGCLIGAEHVNNSYECDIPIGAGICASYQTQTNSPRRARSVASQSIIAYTMSLGAENSVAYSNNSIAIPTNFTISVTTEILPVSMTKTSVDCTMYICGDSTECSNLLLQYGSFCTQLNRALTGIAVEQDKNTQEVFAQVKQIYKTPPIKDFGGFNFSQILPDPSKPSKRSFIEDLLFNKVTLADAGFIKQYGDCLGDIAARDLICAQKFNGLTVLPPLLTDEMIAQYTSALLAGTITCGWTFGAGACLQIPFAMQMAYRFNGIGVTQNVLYENQKLIANQFNSAIGKIQDSLSSTPSALGKLQDVVNQNAQALNTLVKQLSSNFGAISSVLNDILSRLDPPEAEVQIDRLITGRLQSLQTYVTQQLIRAAEIRASANLAATKMSECVLGQSKRVDFCGKGYHLMSFPQSAPHGVVFLHVTYVPAQEKNFTTAPAICHDGKAHFPREGVFVSNGTHWFVTQRNFYEPQIITTDNTFVSGNCDVVIGIVNNTVYDPLQPELDSFKEELDKYFKNHTSPDVDLGDISGINASVVNIQKEIDRLNEVAKNLNESLIDLQELGKYEQYIKWPWYIWLGFIAGLIAIVMVTIMLCCMTSCCSCLKGCCSCGSCCKFDEDDSEPVLKGVKLHYT

SEQ ID NO: 361 - protein, 1273 aa, Artificial Sequence
  source: /note="Description of Artificial Sequence: Synthetic polypeptide"
MFVFLVLLPLVSSQCVNLTTRTQLPPAYTNSFTRGVYYPDKVFRSSVLHSTQDLFLPFFSNVTWFHAIHVSGTNGTKRFDNPVLPFNDGVYFASTEKSNIIRGWIFGTTLDSKTQSLLIVNNATNVVIKVCEFQFCNDPFLGVYYHKNNKSWMESEFRVYSSANNCTFEYVSQPFLMDLEGKQGNFKNLREFVFKNIDGYFKIYSKHTPINLVRDLPQGFSALEPLVDLPIGINITRFQTLLALHRSYLTPGDSSSGWTAGAAAYYVGYLQPRTFLLKYNENGTITDAVDCALDPLSETKCTLKSFTVEKGIYQTSNFRVQPTESIVRFPNITNLCPFGEVFNATRFASVYAWNRKRISNCVADYSVLYNSASFSTFKCYGVSPTKLNDLCFTNVYADSFVIRGDEVRQIAPGQTGKIADYNYKLPDDFTGCVIAWNSNNLDSKVGGNYNYLYRLFRKSNLKPFERDISTEIYQAGSTPCNGVEGFNCYFPLQSYGFQPTNGVGYQPYRVVVLSFELLHAPATVCGPKKSTPLVKNKCVNFNFNGLTGTGVLTESNKKFLPFQQFGRDIADTTDAVRDPQTLEILDITPCSFGGVSVITPGTNTSNQVAVLYQDVNCTEVPVAIHADQLTPTWRVYSTGSNVFQTRAGCLIGAEHVNNSYECDIPIGAGICASYQTQTNSPRRARSVASQSIIAYTMSLGAENSVAYSNNSIAIPTNFTISVTTEILPVSMTKTSVDCTMYICGDSTECSNLLLQYGSFCTQLNRALTGIAVEQDKNTQEVFAQVKQIYKTPPIKDFGGFNFSQILPDPSKPSKRSFIEDLLFNKVTLADAGFIKQYGDCLGDIAARDLICAQKFNGLTVLPPLLTDEMIAQYTSALLACTITSGWTCGAGAALQIPFAMQMAYRFNGIGVTQNVLYENQKLIANQFNSAIGKIQDSLSSTPSALGKLQDVVNQNAQALNTLVKQLSSNFGAISSVLNDILSRLDPPEAEVQIDRLITGRLQSLQTYVTQQLIRAAEIRASANLAATKMSECVLGQSKRVDFCGKGYHLMSFPQSAPHGVVFLHVTYVPAQEKNFTTAPAICHDGKAHFPREGVFVSNGTHWFVTQRNFYEPQIITTDNTFVSGNCDVVIGIVNNTVYDPLQPELDSFKEELDKYFKNHTSPDVDLGDISGINASVVNIQKEIDRLNEVAKNLNESLIDLQELGKYEQYIKWPWYIWLGFIAGLIAIVMVTIMLCCMTSCCSCLKGCCSCGSCCKFDEDDSEPVLKGVKLHYT

SEQ ID NO: 362 - protein, 1273 aa, Artificial Sequence
  source: /note="Description of Artificial Sequence: Synthetic polypeptide"
MFVFLVLLPLVSSQCVNLTTRTQLPPAYTNSFTRGVYYPDKVFRSSVLHSTQDLFLPFFSNVTWFHAIHVSGTNGTKRFDNPVLPFNDGVYFASTEKSNIIRGWIFGTTLDSKTQSLLIVNNATNVVIKVCEFQFCNDPFLGVYYHKNNKSWMESEFRVYSSANNCTFEYVSQPFLMDLEGKQGNFKNLREFVFKNIDGYFKIYSKHTPINLVRDLPQGFSALEPLVDLPIGINITRFQTLLALHRSYLTPGDSSSGWTAGAAAYYVGYLQPRTFLLKYNENGTITDAVDCALDPLSETKCTLKSFTVEKGIYQTSNFRVQPTESIVRFPNITNLCPFGEVFNATRFASVYAWNRKRISNCVADYSVLYNSASFSTFKCYGVSPTKLNDLCFTNVYADSFVIRGDEVRQIAPGQTGKIADYNYKLPDDFTGCVIAWNSNNLDSKVGGNYNYLYRLFRKSNLKPFERDISTEIYQAGSTPCNGVEGFNCYFPLQSYGFQPTNGVGYQPYRVVVLSFELLHAPATVCGPKKSTPLVKNKCVNFNFNGLTGTGVLTESNKKFLPFQQFGRDIADTTDAVRDPQTLEILDITPCSFGGVSVITPGTNTSNQVAVLYQDVNCTEVPVAIHADQLTPTWRVYSTGSNVFQTRAGCLIGAEHVNNSYECDIPIGAGICASYQTQTNSPRRARSVASQSIIAYTMSLGAENSVAYSNNSIAIPTNFTISVTTEILPVSMTKTSVDCTMYICGDSTECSNLLLQYGSFCTQLNRALTGIAVEQDKNTQEVFAQVKQIYKTPPIKDFGGFNFSQILPDPSKPSKRSFIEDLLFNKVTLADAGFIKQYGDCLGDIAARDLICAQKFNGLTVLPPLLTDEMIAQYTSALLAGTITCGWTFGAGACLQIPFAMQMAYRFNGIGVTQNVLYENQKLIANQFNSAIGKIQDSLSSTPSALGKLQDVVNQNAQALNTLVKQLSSNFGAISSVLNDILSRLDPPEAEVQIDRLITGRLQSLQTYVTQQLIRAAEIRASANLAATKMSECVLGQSKRVDFCGKGYHLMSFPQSAPHGVVFLHVTYVPAQEKNFTTAPAICHDGKAHFPREGVFVSNGTHWFVTQRNFYEPQIITTDNTFVSGNCDVVIGIVNNTVYDPLQPELDSFKEELDKYFKNHTSPDVDLGDISGINASVVNIQKEIDRLNEVAKNLNESLIDLQELGKYEQYIKWPWYIWLGFIAGLIAIVMVTIMLCCMTSCCSCLKGCCSCGSCCKFDEDDSEPVLKGVKLHYT

SEQ ID NO: 363 - protein, 1273 aa, Artificial Sequence
  source: /note="Description of Artificial Sequence: Synthetic polypeptide"
MFVFLVLLPLVSSQCVNLTTRTQLPPAYTNSFTRGVYYPDKVFRSSVLHSTQDLFLPFFSNVTWFHAIHVSGTNGTKRFDNPVLPFNDGVYFASTEKSNIIRGWIFGTTLDSKTQSLLIVNNATNVVIKVCEFQFCNDPFLGVYYHKNNKSWMESEFRVYSSANNCTFEYVSQPFLMDLEGKQGNFKNLREFVFKNIDGYFKIYSKHTPINLVRDLPQGFSALEPLVDLPIGINITRFQTLLALHRSYLTPGDSSSGWTAGAAAYYVGYLQPRTFLLKYNENGTITDAVDCALDPLSETKCTLKSFTVEKGIYQTSNFRVQPTESIVRFPNITNLCPFGEVFNATRFASVYAWNRKRISNCVADYSVLYNSASFSTFKCYGVSPTKLNDLCFTNVYADSFVIRGDEVRQIAPGQTGKIADYNYKLPDDFTGCVIAWNSNNLDSKVGGNYNYLYRLFRKSNLKPFERDISTEIYQAGSTPCNGVEGFNCYFPLQSYGFQPTNGVGYQPYRVVVLSFELLHAPATVCGPKKSTNLVKNKCVNFNFNGLTGTGVLTESNKKFLPFQQFGRDIADITDAVRDPQTLEILDITPCSFGGVSVITPGTNTSNQVAVLYQNVNCTEVPVAIHADQLTPTWRVYSTGSNVFQTRAGCLIGAEHVNNSYECDIPIGAGICASYQTQTNSPRRARSVASQSIIAYTMSLGAENSVAYSNNSIAIPTNFTISVTTEILPVSMTKTSVDCTMYICGDSTECSNLLLQYGSFCTQLNRALTGIAVEQDKNTQEVFAQVKQIYKTPPIKDFGGFNFSQILPDPSKPSKRSFIEDLLFNKVTLADAGFIKQYGDCLGDIAARDLICAQKFNGLTVLPPLLTDEMIAQYTSALLAGTITSGWTFGAGPALQIPFAMQMAYRFNGIGVTQNVLYENQKLIANQFNSAIGKIQDSLSSTASALGKLQDVVNQNAQALNTLVKQLSSNFGAISSVLNDILSRLDPPEAEVQIDRLITGRLQSLQTYVTQQLIRAAEIRASANLAATKMSECVLGQSKRVDFCGKGYHLMSFPQSAPHGVVFLHVTYVPAQEKNFTTAPAICHDGKAHFPREGVFVSNGTHWFVTQRNFYEPQIITTDNTFVSGNCDVVIGIVNNTVYDPLQPELDSFKEELDKYFKNHTSPDVDLGDISGINASVVNIQKEIDRLNEVAKNLNESLIDLQELGKYEQYIKWPWYIWLGFIAGLIAIVMVTIMLCCMTSCCSCLKGCCSCGSCCKFDEDDSEPVLKGVKLHYT

SEQ ID NO: 364 - protein, 1273 aa, Artificial Sequence
  source: /note="Description of Artificial Sequence: Synthetic polypeptide"
MFVFLVLLPLVSSQCVNLTTRTQLPPAYTNSFTRGVYYPDKVFRSSVLHSTQDLFLPFFSNVTWFHAIHVSGTNGTKRFDNPVLPFNDGVYFASTEKSNIIRGWIFGTTLDSKTQSLLIVNNATNVVIKVCEFQFCNDPFLGVYYHKNNKSWMESEFRVYSSANNCTFEYVSQPFLMDLEGKQGNFKNLREFVFKNIDGYFKIYSKHTPINLVRDLPQGFSALEPLVDLPIGINITRFQTLLALHRSYLTPGDSSSGWTAGAAAYYVGYLQPRTFLLKYNENGTITDAVDCALDPLSETKCTLKSFTVEKGIYQTSNFRVQPTESIVRFPNITNLCPFGEVFNATRFASVYAWNRKRISNCVADYSVLYNSASFSTFKCYGVSPTKLNDLCFTNVYADSFVIRGDEVRQIAPGQTGKIADYNYKLPDDFTGCVIAWNSNNLDSKVGGNYNYLYRLFRKSNLKPFERDISTEIYQAGSTPCNGVEGFNCYFPLQSYGFQPTNGVGYQPYRVVVLSFELLHAPATVCGPKKSTPLVKNKCVNFNFNGLTGTGVLTESNKKFLPFQQFGRDIADTTDAVRDPQTLEILDITPCSFGGVSVITPGTNTSNQVAVLYQNVNCTEVPVAIHADQLTPTWRVYSTGSNVFQTRAGCLIGAEHVNNSYECDIPIGAGICASYQTQTNSPRRARSVASQSIIAYTMSLGAENSVAYSNNSIAIPTNFTISVTTEILPVSMTKTSVDCTMYICGDSTECSNLLLQYGSFCTQLNRALTGIAVEQDKNTQEVFAQVKQIYKTPPIKDFGGFNFSQILPDPSKPSKRSFIEDLLFNKVTLADAGFIKQYGDCLGDIAARDLICAQKFNGLTVLPPLLTDEMIAQYTSALLAGTITSGWTFGAGPALQIPFAMQMAYRFNGIGVTQNVLYENQKLIANQFNSAIGKIQDSLSSTASALGKLQDVVNQNAQALNTLVKQLSSNFGAISSVLNDILSRLDPPEAEVQIDRLITGRLQSLQTYVTQQLIRAAEIRASANLAATKMSECVLGQSKRVDFCGKGYHLMSFPQSAPHGVVFLHVTYVPAQEKNFTTAPAICHDGKAHFPREGVFVSNGTHWFVTQRNFYEPQIITTDNTFVSGNCDVVIGIVNNTVYDPLQPELDSFKEELDKYFKNHTSPDVDLGDISGINASVVNIQKEIDRLNEVAKNLNESLIDLQELGKYEQYIKWPWYIWLGFIAGLIAIVMVTIMLCCMTSCCSCLKGCCSCGSCCKFDEDDSEPVLKGVKLHYT

SEQ ID NO: 365 - protein, 1273 aa, Artificial Sequence
  source: /note="Description of Artificial Sequence: Synthetic polypeptide"
MFVFLVLLPLVSSQCVNLTTRTQLPPAYTNSFTRGVYYPDKVFRSSVLHSTQDLFLPFFSNVTWFHAIHVSGTNGTKRFDNPVLPFNDGVYFASTEKSNIIRGWIFGTTLDSKTQSLLIVNNATNVVIKVCEFQFCNDPFLGVYYHKNNKSWMESEFRVYSSANNCTFEYVSQPFLMDLEGKQGNFKNLREFVFKNIDGYFKIYSKHTPINLVRDLPQGFSALEPLVDLPIGINITRFQTLLALHRSYLTPGDSSSGWTAGAAAYYVGYLQPRTFLLKYNENGTITDAVDCALDPLSETKCTLKSFTVEKGIYQTSNFRVQPTESIVRFPNITNLCPFGEVFNATRFASVYAWNRKRISNCVADYSVLYNSASFSTFKCYGVSPTKLNDLCFTNVYADSFVIRGDEVRQIAPGQTGKIADYNYKLPDDFTGCVIAWNSNNLDSKVGGNYNYLYRLFRKSNLKPFERDISTEIYQAGSTPCNGVEGFNCYFPLQSYGFQPTNGVGYQPYRVVVLSFELLHAPATVCGPKKSTNLVKNKCVNFNFNGLTGTGVLTESNKKFLPFQQFGRDIADTTDAVRDPQTLEILDITPCSFGGVSVITPGTNTSNQVAVLYQNVNCTEVPVAIHADQLTPTWRVYSTGSNVFQTRAGCLIGAEHVNNSYECDIPIGAGICASYQTQTNSPRRARSVASQSIIAYTMSLGAENSVAYSNNSIAIPTNFTISVTTEILPVSMTKTSVDCTMYICGDSTECSNLLLQYGSFCTQLNRALTGIAVEQDKNTQEVFAQVKQIYKTPPIKDFGGFNFSQILPDPSKPSKRSFIEDLLFNKVTLADAGFIKQYGDCLGDIAARDLICAQKFNGLTVLPPLLTDEMIAQYTSALLACTITSGWTCGAGPALQIPFAMQMAYRFNGIGVTQNVLYENQKLIANQFNSAIGKIQDSLSSTASALGKLQDVVNQNAQALNTLVKQLSSNFGAISSVLNDILSRLDPPEAEVQIDRLITGRLQSLQTYVTQQLIRAAEIRASANLAATKMSECVLGQSKRVDFCGKGYHLMSFPQSAPHGVVFLHVTYVPAQEKNFTTAPAICHDGKAHFPREGVFVSNGTHWFVTQRNFYEPQIITTDNTFVSGNCDVVIGIVNNTVYDPLQPELDSFKEELDKYFKNHTSPDVDLGDISGINASVVNIQKEIDRLNEVAKNLNESLIDLQELGKYEQYIKWPWYIWLGFIAGLIAIVMVTIMLCCMTSCCSCLKGCCSCGSCCKFDEDDSEPVLKGVKLHYT

SEQ ID NO: 366 - protein, 1273 aa, Artificial Sequence
  source: /note="Description of Artificial Sequence: Synthetic polypeptide"
MFVFLVLLPLVSSQCVNLTTRTQLPPAYTNSFTRGVYYPDKVFRSSVLHSTQDLFLPFFSNVTWFHAIHVSGTNGTKRFDNPVLPFNDGVYFASTEKSNIIRGWIFGTTLDSKTQSLLIVNNATNVVIKVCEFQFCNDPFLGVYYHKNNKSWMESEFRVYSSANNCTFEYVSQPFLMDLEGKQGNFKNLREFVFKNIDGYFKIYSKHTPINLVRDLPQGFSALEPLVDLPIGINITRFQTLLALHRSYLTPGDSSSGWTAGAAAYYVGYLQPRTFLLKYNENGTITDAVDCALDPLSETKCTLKSFTVEKGIYQTSNFRVQPTESIVRFPNITNLCPFGEVFNATRFASVYAWNRKRISNCVADYSVLYNSASFSTFKCYGVSPTKLNDLCFTNVYADSFVIRGDEVRQIAPGQTGKIADYNYKLPDDFTGCVIAWNSNNLDSKVGGNYNYLYRLFRKSNLKPFERDISTEIYQAGSTPCNGVEGFNCYFPLQSYGFQPTNGVGYQPYRVVVLSFELLHAPATVCGPKKSTNLVKNKCVNFNFNGLTGTGVLTESNKKFLPFQQFGRDIADTTDAVRDPQTLEILDITPCSFGGVSVITPGTNTSNQVAVLYQNVNCTEVPVAIHADQLTPTWRVYSTGSNVFQTRAGCLIGAEHVNNSYECDIPIGAGICASYQTQTNSPRRARSVASQSIIAYTMSLGAENSVAYSNNSIAIPTNFTISVTTEILPVSMTKTSVDCTMYICGDSTECSNLLLQYGSFCTQLNRALTGIAVEQDKNTQEVFAQVKQIYKTPPIKDFGGFNFSQILPDPSKPSKRSFIEDLLFNKVTLADAGFIKQYGDCLGDIAARDLICAQKFNGLTVLPPLLTDEMIAQYTSALLAGTITCGWTFGAGPCLQIPFAMQMAYRFNGIGVTQNVLYENQKLIANQFNSAIGKIQDSLSSTASALGKLQDVVNQNAQALNTLVKQLSSNFGAISSVLNDILSRLDPPEAEVQIDRLITGRLQSLQTYVTQQLIRAAEIRASANLAATKMSECVLGQSKRVDFCGKGYHLMSFPQSAPHGVVFLHVTYVPAQEKNFTTAPAICHDGKAHFPREGVFVSNGTHWFVTQRNFYEPQIITTDNTFVSGNCDVVIGIVNNTVYDPLQPELDSFKEELDKYFKNHTSPDVDLGDISGINASVVNIQKEIDRLNEVAKNLNESLIDLQELGKYEQYIKWPWYIWLGFIAGLIAIVMVTIMLCCMTSCCSCLKGCCSCGSCCKFDEDDSEPVLKGVKLHYT

SEQ ID NO: 367 - protein, 1273 aa, Artificial Sequence
  source: /note="Description of Artificial Sequence: Synthetic polypeptide"
MFVFLVLLPLVSSQCVNLTTRTQLPPAYTNSFTRGVYYPDKVFRSSVLHSTQDLFLPFFSNVTWFHAIHVSGTNGTKRFDNPVLPFNDGVYFASTEKSNIIRGWIFGTTLDSKTQSLLIVNNATNVVIKVCEFQFCNDPFLGVYYHKNNKSWMESEFRVYSSANNCTFEYVSQPFLMDLEGKQGNFKNLREFVFKNIDGYFKIYSKHTPINLVRDLPQGFSALEPLVDLPIGINITRFQTLLALHRSYLTPGDSSSGWTAGAAAYYVGYLQPRTFLLKYNENGTITDAVDCALDPLSETKCTLKSFTVEKGIYQTSNFRVQPTESIVRFPNITNLCPFGEVFNATRFASVYAWNRKRISNCVADYSVLYNSASFSTFKCYGVSPTKLNDLCFTNVYADSFVIRGDEVRQIAPGQTGKIADYNYKLPDDFTGCVIAWNSNNLDSKVGGNYNYLYRLFRKSNLKPFERDISTEIYQAGSTPCNGVEGFNCYFPLQSYGFQPTNGVGYQPYRVVVLSFELLHAPATVCGPKKSTPLVKNKCVNFNFNGLTGTGVLTESNKKFLPFQQFGRDIADITDAVRDPQTLEILDITPCSFGGVSVITPGTNTSNQVAVLYQDVNCTEVPVAIHADQLTPTWRVYSTGSNVFQTRAGCLIGAEHVNNSYECDIPIGAGICASYQTQTNSPRRARSVASQSIIAYTMSLGAENSVAYSNNSIAIPTNFTISVTTEILPVSMTKTSVDCTMYICGDSTECSNLLLQYGSFCTQLNRALTGIAVEQDKNTQEVFAQVKQIYKTPPIKDFGGFNFSQILPDPSKPSKRSFIEDLLFNKVTLADAGFIKQYGDCLGDIAARDLICAQKFNGLTVLPPLLTDEMIAQYTSALLAGTITSGWTFGAGPALQIPFAMQMAYRFNGIGVTQNVLYENQKLIANQFNSAIGKIQDSLSSTASALGKLQDVVNQNAQALNTLVKQLSSNFGAISSVLNDILSRLDPPEAEVQIDRLITGRLQSLQTYVTQQLIRAAEIRASANLAATKMSECVLGQSKRVDFCGKGYHLMSFPQSAPHGVVFLHVTYVPAQEKNFTTAPAICHDGKAHFPREGVFVSNGTHWFVTQRNFYEPQIITTDNTFVSGNCDVVIGIVNNTVYDPLQPELDSFKEELDKYFKNHTSPDVDLGDISGINASVVNIQKEIDRLNEVAKNLNESLIDLQELGKYEQYIKWPWYIWLGFIAGLIAIVMVTIMLCCMTSCCSCLKGCCSCGSCCKFDEDDSEPVLKGVKLHYT

SEQ ID NO: 368 - protein, 1273 aa, Artificial Sequence
  source: /note="Description of Artificial Sequence: Synthetic polypeptide"
MFVFLVLLPLVSSQCVNLTTRTQLPPAYTNSFTRGVYYPDKVFRSSVLHSTQDLFLPFFSNVTWFHAIHVSGTNGTKRFDNPVLPFNDGVYFASTEKSNIIRGWIFGTTLDSKTQSLLIVNNATNVVIKVCEFQFCNDPFLGVYYHKNNKSWMESEFRVYSSANNCTFEYVSQPFLMDLEGKQGNFKNLREFVFKNIDGYFKIYSKHTPINLVRDLPQGFSALEPLVDLPIGINITRFQTLLALHRSYLTPGDSSSGWTAGAAAYYVGYLQPRTFLLKYNENGTITDAVDCALDPLSETKCTLKSFTVEKGIYQTSNFRVQPTESIVRFPNITNLCPFGEVFNATRFASVYAWNRKRISNCVADYSVLYNSASFSTFKCYGVSPTKLNDLCFTNVYADSFVIRGDEVRQIAPGQTGKIADYNYKLPDDFTGCVIAWNSNNLDSKVGGNYNYLYRLFRKSNLKPFERDISTEIYQAGSTPCNGVEGFNCYFPLQSYGFQPTNGVGYQPYRVVVLSFELLHAPATVCGPKKSTNLVKNKCVNFNFNGLTGTGVLTESNKKFLPFQQFGRDIADITDAVRDPQTLEILDITPCSFGGVSVITPGTNTSNQVAVLYQDVNCTEVPVAIHADQLTPTWRVYSTGSNVFQTRAGCLIGAEHVNNSYECDIPIGAGICASYQTQTNSPRRARSVASQSIIAYTMSLGAENSVAYSNNSIAIPTNFTISVTTEILPVSMTKTSVDCTMYICGDSTECSNLLLQYGSFCTQLNRALTGIAVEQDKNTQEVFAQVKQIYKTPPIKDFGGFNFSQILPDPSKPSKRSFIEDLLFNKVTLADAGFIKQYGDCLGDIAARDLICAQKFNGLTVLPPLLTDEMIAQYTSALLACTITSGWTCGAGPALQIPFAMQMAYRFNGIGVTQNVLYENQKLIANQFNSAIGKIQDSLSSTASALGKLQDVVNQNAQALNTLVKQLSSNFGAISSVLNDILSRLDPPEAEVQIDRLITGRLQSLQTYVTQQLIRAAEIRASANLAATKMSECVLGQSKRVDFCGKGYHLMSFPQSAPHGVVFLHVTYVPAQEKNFTTAPAICHDGKAHFPREGVFVSNGTHWFVTQRNFYEPQIITTDNTFVSGNCDVVIGIVNNTVYDPLQPELDSFKEELDKYFKNHTSPDVDLGDISGINASVVNIQKEIDRLNEVAKNLNESLIDLQELGKYEQYIKWPWYIWLGFIAGLIAIVMVTIMLCCMTSCCSCLKGCCSCGSCCKFDEDDSEPVLKGVKLHYT

SEQ ID NO: 369 - protein, 1273 aa, Artificial Sequence
  source: /note="Description of Artificial Sequence: Synthetic polypeptide"
MFVFLVLLPLVSSQCVNLTTRTQLPPAYTNSFTRGVYYPDKVFRSSVLHSTQDLFLPFFSNVTWFHAIHVSGTNGTKRFDNPVLPFNDGVYFASTEKSNIIRGWIFGTTLDSKTQSLLIVNNATNVVIKVCEFQFCNDPFLGVYYHKNNKSWMESEFRVYSSANNCTFEYVSQPFLMDLEGKQGNFKNLREFVFKNIDGYFKIYSKHTPINLVRDLPQGFSALEPLVDLPIGINITRFQTLLALHRSYLTPGDSSSGWTAGAAAYYVGYLQPRTFLLKYNENGTITDAVDCALDPLSETKCTLKSFTVEKGIYQTSNFRVQPTESIVRFPNITNLCPFGEVFNATRFASVYAWNRKRISNCVADYSVLYNSASFSTFKCYGVSPTKLNDLCFTNVYADSFVIRGDEVRQIAPGQTGKIADYNYKLPDDFTGCVIAWNSNNLDSKVGGNYNYLYRLFRKSNLKPFERDISTEIYQAGSTPCNGVEGFNCYFPLQSYGFQPTNGVGYQPYRVVVLSFELLHAPATVCGPKKSTNLVKNKCVNFNFNGLTGTGVLTESNKKFLPFQQFGRDIADITDAVRDPQTLEILDITPCSFGGVSVITPGTNTSNQVAVLYQDVNCTEVPVAIHADQLTPTWRVYSTGSNVFQTRAGCLIGAEHVNNSYECDIPIGAGICASYQTQTNSPRRARSVASQSIIAYTMSLGAENSVAYSNNSIAIPTNFTISVTTEILPVSMTKTSVDCTMYICGDSTECSNLLLQYGSFCTQLNRALTGIAVEQDKNTQEVFAQVKQIYKTPPIKDFGGFNFSQILPDPSKPSKRSFIEDLLFNKVTLADAGFIKQYGDCLGDIAARDLICAQKFNGLTVLPPLLTDEMIAQYTSALLAGTITCGWTFGAGPCLQIPFAMQMAYRFNGIGVTQNVLYENQKLIANQFNSAIGKIQDSLSSTASALGKLQDVVNQNAQALNTLVKQLSSNFGAISSVLNDILSRLDPPEAEVQIDRLITGRLQSLQTYVTQQLIRAAEIRASANLAATKMSECVLGQSKRVDFCGKGYHLMSFPQSAPHGVVFLHVTYVPAQEKNFTTAPAICHDGKAHFPREGVFVSNGTHWFVTQRNFYEPQIITTDNTFVSGNCDVVIGIVNNTVYDPLQPELDSFKEELDKYFKNHTSPDVDLGDISGINASVVNIQKEIDRLNEVAKNLNESLIDLQELGKYEQYIKWPWYIWLGFIAGLIAIVMVTIMLCCMTSCCSCLKGCCSCGSCCKFDEDDSEPVLKGVKLHYT

SEQ ID NO: 370 - protein, 1273 aa, Artificial Sequence
  source: /note="Description of Artificial Sequence: Synthetic polypeptide"
MFVFLVLLPLVSSQCVNLTTRTQLPPAYTNSFTRGVYYPDKVFRSSVLHSTQDLFLPFFSNVTWFHAIHVSGTNGTKRFDNPVLPFNDGVYFASTEKSNIIRGWIFGTTLDSKTQSLLIVNNATNVVIKVCEFQFCNDPFLGVYYHKNNKSWMESEFRVYSSANNCTFEYVSQPFLMDLEGKQGNFKNLREFVFKNIDGYFKIYSKHTPINLVRDLPQGFSALEPLVDLPIGINITRFQTLLALHRSYLTPGDSSSGWTAGAAAYYVGYLQPRTFLLKYNENGTITDAVDCALDPLSETKCTLKSFTVEKGIYQTSNFRVQPTESIVRFPNITNLCPFGEVFNATRFASVYAWNRKRISNCVADYSVLYNSASFSTFKCYGVSPTKLNDLCFTNVYADSFVIRGDEVRQIAPGQTGKIADYNYKLPDDFTGCVIAWNSNNLDSKVGGNYNYLYRLFRKSNLKPFERDISTEIYQAGSTPCNGVEGFNCYFPLQSYGFQPTNGVGYQPYRVVVLSFELLHAPATVCGPKKSTPLVKNKCVNFNFNGLTGTGVLTESNKKFLPFQQFGRDIADTTDAVRDPQTLEILDITPCSFGGVSVITPGTNTSNQVAVLYQDVNCTEVPVAIHADQLTPTWRVYSTGSNVFQTRAGCLIGAEHVNNSYECDIPIGAGICASYQTQTNSPRRARSVASQSIIAYTMSLGAENSVAYSNNSIAIPTNFTISVTTEILPVSMTKTSVDCTMYICGDSTECSNLLLQYGSFCTQLNRALTGIAVEQDKNTQEVFAQVKQIYKTPPIKDFGGFNFSQILPDPSKPSKRSFIEDLLFNKVTLADAGFIKQYGDCLGDIAARDLICAQKFNGLTVLPPLLTDEMIAQYTSALLACTITSGWTCGAGPALQIPFAMQMAYRFNGIGVTQNVLYENQKLIANQFNSAIGKIQDSLSSTASALGKLQDVVNQNAQALNTLVKQLSSNFGAISSVLNDILSRLDPPEAEVQIDRLITGRLQSLQTYVTQQLIRAAEIRASANLAATKMSECVLGQSKRVDFCGKGYHLMSFPQSAPHGVVFLHVTYVPAQEKNFTTAPAICHDGKAHFPREGVFVSNGTHWFVTQRNFYEPQIITTDNTFVSGNCDVVIGIVNNTVYDPLQPELDSFKEELDKYFKNHTSPDVDLGDISGINASVVNIQKEIDRLNEVAKNLNESLIDLQELGKYEQYIKWPWYIWLGFIAGLIAIVMVTIMLCCMTSCCSCLKGCCSCGSCCKFDEDDSEPVLKGVKLHYT

SEQ ID NO: 371 - protein, 1273 aa, Artificial Sequence
  source: /note="Description of Artificial Sequence: Synthetic polypeptide"
MFVFLVLLPLVSSQCVNLTTRTQLPPAYTNSFTRGVYYPDKVFRSSVLHSTQDLFLPFFSNVTWFHAIHVSGTNGTKRFDNPVLPFNDGVYFASTEKSNIIRGWIFGTTLDSKTQSLLIVNNATNVVIKVCEFQFCNDPFLGVYYHKNNKSWMESEFRVYSSANNCTFEYVSQPFLMDLEGKQGNFKNLREFVFKNIDGYFKIYSKHTPINLVRDLPQGFSALEPLVDLPIGINITRFQTLLALHRSYLTPGDSSSGWTAGAAAYYVGYLQPRTFLLKYNENGTITDAVDCALDPLSETKCTLKSFTVEKGIYQTSNFRVQPTESIVRFPNITNLCPFGEVFNATRFASVYAWNRKRISNCVADYSVLYNSASFSTFKCYGVSPTKLNDLCFTNVYADSFVIRGDEVRQIAPGQTGKIADYNYKLPDDFTGCVIAWNSNNLDSKVGGNYNYLYRLFRKSNLKPFERDISTEIYQAGSTPCNGVEGFNCYFPLQSYGFQPTNGVGYQPYRVVVLSFELLHAPATVCGPKKSTPLVKNKCVNFNFNGLTGTGVLTESNKKFLPFQQFGRDIADTTDAVRDPQTLEILDITPCSFGGVSVITPGTNTSNQVAVLYQDVNCTEVPVAIHADQLTPTWRVYSTGSNVFQTRAGCLIGAEHVNNSYECDIPIGAGICASYQTQTNSPRRARSVASQSIIAYTMSLGAENSVAYSNNSIAIPTNFTISVTTEILPVSMTKTSVDCTMYICGDSTECSNLLLQYGSFCTQLNRALTGIAVEQDKNTQEVFAQVKQIYKTPPIKDFGGFNFSQILPDPSKPSKRSFIEDLLFNKVTLADAGFIKQYGDCLGDIAARDLICAQKFNGLTVLPPLLTDEMIAQYTSALLAGTITCGWTFGAGPCLQIPFAMQMAYRFNGIGVTQNVLYENQKLIANQFNSAIGKIQDSLSSTASALGKLQDVVNQNAQALNTLVKQLSSNFGAISSVLNDILSRLDPPEAEVQIDRLITGRLQSLQTYVTQQLIRAAEIRASANLAATKMSECVLGQSKRVDFCGKGYHLMSFPQSAPHGVVFLHVTYVPAQEKNFTTAPAICHDGKAHFPREGVFVSNGTHWFVTQRNFYEPQIITTDNTFVSGNCDVVIGIVNNTVYDPLQPELDSFKEELDKYFKNHTSPDVDLGDISGINASVVNIQKEIDRLNEVAKNLNESLIDLQELGKYEQYIKWPWYIWLGFIAGLIAIVMVTIMLCCMTSCCSCLKGCCSCGSCCKFDEDDSEPVLKGVKLHYT

SEQ ID NO: 372 - protein, 1273 aa, Artificial Sequence
  source: /note="Description of Artificial Sequence: Synthetic polypeptide"
MFVFLVLLPLVSSQCVNLTTRTQLPPAYTNSFTRGVYYPDKVFRSSVLHSTQDLFLPFFSNVTWFHAIHVSGTNGTKRFDNPVLPFNDGVYFASTEKSNIIRGWIFGTTLDSKTQSLLIVNNATNVVIKVCEFQFCNDPFLGVYYHKNNKSWMESEFRVYSSANNCTFEYVSQPFLMDLEGKQGNFKNLREFVFKNIDGYFKIYSKHTPINLVRDLPQGFSALEPLVDLPIGINITRFQTLLALHRSYLTPGDSSSGWTAGAAAYYVGYLQPRTFLLKYNENGTITDAVDCALDPLSETKCTLKSFTVEKGIYQTSNFRVQPTESIVRFPNITNLCPFGEVFNATRFASVYAWNRKRISNCVADYSVLYNSASFSTFKCYGVSPTKLNDLCFTNVYADSFVIRGDEVRQIAPGQTGKIADYNYKLPDDFTGCVIAWNSNNLDSKVGGNYNYLYRLFRKSNLKPFERDISTEIYQAGSTPCNGVEGFNCYFPLQSYGFQPTNGVGYQPYRVVVLSFELLHAPATVCGPKKSTPLVKNKCVNFNFNGLTGTGVLTESNKKFLPFQQFGRDIADITDAVRDPQTLEILDITPCSFGGVSVITPGTNTSNQVAVLYQNVNCTEVPVAIHADQLTPTWRVYSTGSNVFQTRAGCLIGAEHVNNSYECDIPIGAGICASYQTQTNSPRRARSVASQSIIAYTMSLGAENSVAYSNNSIAIPTNFTISVTTEILPVSMTKTSVDCTMYICGDSTECSNLLLQYGSFCTQLNRALTGIAVEQDKNTQEVFAQVKQIYKTPPIKDFGGFNFSQILPDPSKPSKRSFIEDLLFNKVTLADAGFIKQYGDCLGDIAARDLICAQKFNGLTVLPPLLTDEMIAQYTSALLAGTITSGWTFGAGAALQIPFAMQMAYRFNGIGVTQNVLYENQKLIANQFNSAIGKIQDSLSSTASALGKLQDVVNQNAQALNTLVKQLSSNFGAISSVLNDILSRLDPPEAEVQIDRLITGRLQSLQTYVTQQLIRAAEIRASANLAATKMSECVLGQSKRVDFCGKGYHLMSFPQSAPHGVVFLHVTYVPAQEKNFTTAPAICHDGKAHFPREGVFVSNGTHWFVTQRNFYEPQIITTDNTFVSGNCDVVIGIVNNTVYDPLQPELDSFKEELDKYFKNHTSPDVDLGDISGINASVVNIQKEIDRLNEVAKNLNESLIDLQELGKYEQYIKWPWYIWLGFIAGLIAIVMVTIMLCCMTSCCSCLKGCCSCGSCCKFDEDDSEPVLKGVKLHYT

SEQ ID NO: 373 - protein, 1273 aa, Artificial Sequence
  source: /note="Description of Artificial Sequence: Synthetic polypeptide"
MFVFLVLLPLVSSQCVNLTTRTQLPPAYTNSFTRGVYYPDKVFRSSVLHSTQDLFLPFFSNVTWFHAIHVSGTNGTKRFDNPVLPFNDGVYFASTEKSNIIRGWIFGTTLDSKTQSLLIVNNATNVVIKVCEFQFCNDPFLGVYYHKNNKSWMESEFRVYSSANNCTFEYVSQPFLMDLEGKQGNFKNLREFVFKNIDGYFKIYSKHTPINLVRDLPQGFSALEPLVDLPIGINITRFQTLLALHRSYLTPGDSSSGWTAGAAAYYVGYLQPRTFLLKYNENGTITDAVDCALDPLSETKCTLKSFTVEKGIYQTSNFRVQPTESIVRFPNITNLCPFGEVFNATRFASVYAWNRKRISNCVADYSVLYNSASFSTFKCYGVSPTKLNDLCFTNVYADSFVIRGDEVRQIAPGQTGKIADYNYKLPDDFTGCVIAWNSNNLDSKVGGNYNYLYRLFRKSNLKPFERDISTEIYQAGSTPCNGVEGFNCYFPLQSYGFQPTNGVGYQPYRVVVLSFELLHAPATVCGPKKSTNLVKNKCVNFNFNGLTGTGVLTESNKKFLPFQQFGRDIADITDAVRDPQTLEILDITPCSFGGVSVITPGTNTSNQVAVLYQNVNCTEVPVAIHADQLTPTWRVYSTGSNVFQTRAGCLIGAEHVNNSYECDIPIGAGICASYQTQTNSPRRARSVASQSIIAYTMSLGAENSVAYSNNSIAIPTNFTISVTTEILPVSMTKTSVDCTMYICGDSTECSNLLLQYGSFCTQLNRALTGIAVEQDKNTQEVFAQVKQIYKTPPIKDFGGFNFSQILPDPSKPSKRSFIEDLLFNKVTLADAGFIKQYGDCLGDIAARDLICAQKFNGLTVLPPLLTDEMIAQYTSALLACTITSGWTCGAGAALQIPFAMQMAYRFNGIGVTQNVLYENQKLIANQFNSAIGKIQDSLSSTASALGKLQDVVNQNAQALNTLVKQLSSNFGAISSVLNDILSRLDPPEAEVQIDRLITGRLQSLQTYVTQQLIRAAEIRASANLAATKMSECVLGQSKRVDFCGKGYHLMSFPQSAPHGVVFLHVTYVPAQEKNFTTAPAICHDGKAHFPREGVFVSNGTHWFVTQRNFYEPQIITTDNTFVSGNCDVVIGIVNNTVYDPLQPELDSFKEELDKYFKNHTSPDVDLGDISGINASVVNIQKEIDRLNEVAKNLNESLIDLQELGKYEQYIKWPWYIWLGFIAGLIAIVMVTIMLCCMTSCCSCLKGCCSCGSCCKFDEDDSEPVLKGVKLHYT

SEQ ID NO: 374 - protein, 1273 aa, Artificial Sequence
  source: /note="Description of Artificial Sequence: Synthetic polypeptide"
MFVFLVLLPLVSSQCVNLTTRTQLPPAYTNSFTRGVYYPDKVFRSSVLHSTQDLFLPFFSNVTWFHAIHVSGTNGTKRFDNPVLPFNDGVYFASTEKSNIIRGWIFGTTLDSKTQSLLIVNNATNVVIKVCEFQFCNDPFLGVYYHKNNKSWMESEFRVYSSANNCTFEYVSQPFLMDLEGKQGNFKNLREFVFKNIDGYFKIYSKHTPINLVRDLPQGFSALEPLVDLPIGINITRFQTLLALHRSYLTPGDSSSGWTAGAAAYYVGYLQPRTFLLKYNENGTITDAVDCALDPLSETKCTLKSFTVEKGIYQTSNFRVQPTESIVRFPNITNLCPFGEVFNATRFASVYAWNRKRISNCVADYSVLYNSASFSTFKCYGVSPTKLNDLCFTNVYADSFVIRGDEVRQIAPGQTGKIADYNYKLPDDFTGCVIAWNSNNLDSKVGGNYNYLYRLFRKSNLKPFERDISTEIYQAGSTPCNGVEGFNCYFPLQSYGFQPTNGVGYQPYRVVVLSFELLHAPATVCGPKKSTNLVKNKCVNFNFNGLTGTGVLTESNKKFLPFQQFGRDIADITDAVRDPQTLEILDITPCSFGGVSVITPGTNTSNQVAVLYQNVNCTEVPVAIHADQLTPTWRVYSTGSNVFQTRAGCLIGAEHVNNSYECDIPIGAGICASYQTQTNSPRRARSVASQSIIAYTMSLGAENSVAYSNNSIAIPTNFTISVTTEILPVSMTKTSVDCTMYICGDSTECSNLLLQYGSFCTQLNRALTGIAVEQDKNTQEVFAQVKQIYKTPPIKDFGGFNFSQILPDPSKPSKRSFIEDLLFNKVTLADAGFIKQYGDCLGDIAARDLICAQKFNGLTVLPPLLTDEMIAQYTSALLAGTITCGWTFGAGACLQIPFAMQMAYRFNGIGVTQNVLYENQKLIANQFNSAIGKIQDSLSSTASALGKLQDVVNQNAQALNTLVKQLSSNFGAISSVLNDILSRLDPPEAEVQIDRLITGRLQSLQTYVTQQLIRAAEIRASANLAATKMSECVLGQSKRVDFCGKGYHLMSFPQSAPHGVVFLHVTYVPAQEKNFTTAPAICHDGKAHFPREGVFVSNGTHWFVTQRNFYEPQIITTDNTFVSGNCDVVIGIVNNTVYDPLQPELDSFKEELDKYFKNHTSPDVDLGDISGINASVVNIQKEIDRLNEVAKNLNESLIDLQELGKYEQYIKWPWYIWLGFIAGLIAIVMVTIMLCCMTSCCSCLKGCCSCGSCCKFDEDDSEPVLKGVKLHYT

SEQ ID NO: 375 - protein, 1273 aa, Artificial Sequence
  source: /note="Description of Artificial Sequence: Synthetic polypeptide"
MFVFLVLLPLVSSQCVNLTTRTQLPPAYTNSFTRGVYYPDKVFRSSVLHSTQDLFLPFFSNVTWFHAIHVSGTNGTKRFDNPVLPFNDGVYFASTEKSNIIRGWIFGTTLDSKTQSLLIVNNATNVVIKVCEFQFCNDPFLGVYYHKNNKSWMESEFRVYSSANNCTFEYVSQPFLMDLEGKQGNFKNLREFVFKNIDGYFKIYSKHTPINLVRDLPQGFSALEPLVDLPIGINITRFQTLLALHRSYLTPGDSSSGWTAGAAAYYVGYLQPRTFLLKYNENGTITDAVDCALDPLSETKCTLKSFTVEKGIYQTSNFRVQPTESIVRFPNITNLCPFGEVFNATRFASVYAWNRKRISNCVADYSVLYNSASFSTFKCYGVSPTKLNDLCFTNVYADSFVIRGDEVRQIAPGQTGKIADYNYKLPDDFTGCVIAWNSNNLDSKVGGNYNYLYRLFRKSNLKPFERDISTEIYQAGSTPCNGVEGFNCYFPLQSYGFQPTNGVGYQPYRVVVLSFELLHAPATVCGPKKSTPLVKNKCVNFNFNGLTGTGVLTESNKKFLPFQQFGRDIADTTDAVRDPQTLEILDITPCSFGGVSVITPGTNTSNQVAVLYQNVNCTEVPVAIHADQLTPTWRVYSTGSNVFQTRAGCLIGAEHVNNSYECDIPIGAGICASYQTQTNSPRRARSVASQSIIAYTMSLGAENSVAYSNNSIAIPTNFTISVTTEILPVSMTKTSVDCTMYICGDSTECSNLLLQYGSFCTQLNRALTGIAVEQDKNTQEVFAQVKQIYKTPPIKDFGGFNFSQILPDPSKPSKRSFIEDLLFNKVTLADAGFIKQYGDCLGDIAARDLICAQKFNGLTVLPPLLTDEMIAQYTSALLACTITSGWTCGAGAALQIPFAMQMAYRFNGIGVTQNVLYENQKLIANQFNSAIGKIQDSLSSTASALGKLQDVVNQNAQALNTLVKQLSSNFGAISSVLNDILSRLDPPEAEVQIDRLITGRLQSLQTYVTQQLIRAAEIRASANLAATKMSECVLGQSKRVDFCGKGYHLMSFPQSAPHGVVFLHVTYVPAQEKNFTTAPAICHDGKAHFPREGVFVSNGTHWFVTQRNFYEPQIITTDNTFVSGNCDVVIGIVNNTVYDPLQPELDSFKEELDKYFKNHTSPDVDLGDISGINASVVNIQKEIDRLNEVAKNLNESLIDLQELGKYEQYIKWPWYIWLGFIAGLIAIVMVTIMLCCMTSCCSCLKGCCSCGSCCKFDEDDSEPVLKGVKLHYT

SEQ ID NO: 376 - protein, 1273 aa, Artificial Sequence
  source: /note="Description of Artificial Sequence: Synthetic polypeptide"
MFVFLVLLPLVSSQCVNLTTRTQLPPAYTNSFTRGVYYPDKVFRSSVLHSTQDLFLPFFSNVTWFHAIHVSGTNGTKRFDNPVLPFNDGVYFASTEKSNIIRGWIFGTTLDSKTQSLLIVNNATNVVIKVCEFQFCNDPFLGVYYHKNNKSWMESEFRVYSSANNCTFEYVSQPFLMDLEGKQGNFKNLREFVFKNIDGYFKIYSKHTPINLVRDLPQGFSALEPLVDLPIGINITRFQTLLALHRSYLTPGDSSSGWTAGAAAYYVGYLQPRTFLLKYNENGTITDAVDCALDPLSETKCTLKSFTVEKGIYQTSNFRVQPTESIVRFPNITNLCPFGEVFNATRFASVYAWNRKRISNCVADYSVLYNSASFSTFKCYGVSPTKLNDLCFTNVYADSFVIRGDEVRQIAPGQTGKIADYNYKLPDDFTGCVIAWNSNNLDSKVGGNYNYLYRLFRKSNLKPFERDISTEIYQAGSTPCNGVEGFNCYFPLQSYGFQPTNGVGYQPYRVVVLSFELLHAPATVCGPKKSTPLVKNKCVNFNFNGLTGTGVLTESNKKFLPFQQFGRDIADTTDAVRDPQTLEILDITPCSFGGVSVITPGTNTSNQVAVLYQNVNCTEVPVAIHADQLTPTWRVYSTGSNVFQTRAGCLIGAEHVNNSYECDIPIGAGICASYQTQTNSPRRARSVASQSIIAYTMSLGAENSVAYSNNSIAIPTNFTISVTTEILPVSMTKTSVDCTMYICGDSTECSNLLLQYGSFCTQLNRALTGIAVEQDKNTQEVFAQVKQIYKTPPIKDFGGFNFSQILPDPSKPSKRSFIEDLLFNKVTLADAGFIKQYGDCLGDIAARDLICAQKFNGLTVLPPLLTDEMIAQYTSALLAGTITCGWTFGAGACLQIPFAMQMAYRFNGIGVTQNVLYENQKLIANQFNSAIGKIQDSLSSTASALGKLQDVVNQNAQALNTLVKQLSSNFGAISSVLNDILSRLDPPEAEVQIDRLITGRLQSLQTYVTQQLIRAAEIRASANLAATKMSECVLGQSKRVDFCGKGYHLMSFPQSAPHGVVFLHVTYVPAQEKNFTTAPAICHDGKAHFPREGVFVSNGTHWFVTQRNFYEPQIITTDNTFVSGNCDVVIGIVNNTVYDPLQPELDSFKEELDKYFKNHTSPDVDLGDISGINASVVNIQKEIDRLNEVAKNLNESLIDLQELGKYEQYIKWPWYIWLGFIAGLIAIVMVTIMLCCMTSCCSCLKGCCSCGSCCKFDEDDSEPVLKGVKLHYT

SEQ ID NO: 377 - protein, 1273 aa, Artificial Sequence
  source: /note="Description of Artificial Sequence: Synthetic polypeptide"
MFVFLVLLPLVSSQCVNLTTRTQLPPAYTNSFTRGVYYPDKVFRSSVLHSTQDLFLPFFSNVTWFHAIHVSGTNGTKRFDNPVLPFNDGVYFASTEKSNIIRGWIFGTTLDSKTQSLLIVNNATNVVIKVCEFQFCNDPFLGVYYHKNNKSWMESEFRVYSSANNCTFEYVSQPFLMDLEGKQGNFKNLREFVFKNIDGYFKIYSKHTPINLVRDLPQGFSALEPLVDLPIGINITRFQTLLALHRSYLTPGDSSSGWTAGAAAYYVGYLQPRTFLLKYNENGTITDAVDCALDPLSETKCTLKSFTVEKGIYQTSNFRVQPTESIVRFPNITNLCPFGEVFNATRFASVYAWNRKRISNCVADYSVLYNSASFSTFKCYGVSPTKLNDLCFTNVYADSFVIRGDEVRQIAPGQTGKIADYNYKLPDDFTGCVIAWNSNNLDSKVGGNYNYLYRLFRKSNLKPFERDISTEIYQAGSTPCNGVEGFNCYFPLQSYGFQPTNGVGYQPYRVVVLSFELLHAPATVCGPKKSTPLVKNKCVNFNFNGLTGTGVLTESNKKFLPFQQFGRDIADITDAVRDPQTLEILDITPCSFGGVSVITPGTNTSNQVAVLYQDVNCTEVPVAIHADQLTPTWRVYSTGSNVFQTRAGCLIGAEHVNNSYECDIPIGAGICASYQTQTNSPRRARSVASQSIIAYTMSLGAENSVAYSNNSIAIPTNFTISVTTEILPVSMTKTSVDCTMYICGDSTECSNLLLQYGSFCTQLNRALTGIAVEQDKNTQEVFAQVKQIYKTPPIKDFGGFNFSQILPDPSKPSKRSFIEDLLFNKVTLADAGFIKQYGDCLGDIAARDLICAQKFNGLTVLPPLLTDEMIAQYTSALLACTITSGWTCGAGAALQIPFAMQMAYRFNGIGVTQNVLYENQKLIANQFNSAIGKIQDSLSSTASALGKLQDVVNQNAQALNTLVKQLSSNFGAISSVLNDILSRLDPPEAEVQIDRLITGRLQSLQTYVTQQLIRAAEIRASANLAATKMSECVLGQSKRVDFCGKGYHLMSFPQSAPHGVVFLHVTYVPAQEKNFTTAPAICHDGKAHFPREGVFVSNGTHWFVTQRNFYEPQIITTDNTFVSGNCDVVIGIVNNTVYDPLQPELDSFKEELDKYFKNHTSPDVDLGDISGINASVVNIQKEIDRLNEVAKNLNESLIDLQELGKYEQYIKWPWYIWLGFIAGLIAIVMVTIMLCCMTSCCSCLKGCCSCGSCCKFDEDDSEPVLKGVKLHYT

SEQ ID NO: 378 - protein, 1273 aa, Artificial Sequence
  source: /note="Description of Artificial Sequence: Synthetic polypeptide"
MFVFLVLLPLVSSQCVNLTTRTQLPPAYTNSFTRGVYYPDKVFRSSVLHSTQDLFLPFFSNVTWFHAIHVSGTNGTKRFDNPVLPFNDGVYFASTEKSNIIRGWIFGTTLDSKTQSLLIVNNATNVVIKVCEFQFCNDPFLGVYYHKNNKSWMESEFRVYSSANNCTFEYVSQPFLMDLEGKQGNFKNLREFVFKNIDGYFKIYSKHTPINLVRDLPQGFSALEPLVDLPIGINITRFQTLLALHRSYLTPGDSSSGWTAGAAAYYVGYLQPRTFLLKYNENGTITDAVDCALDPLSETKCTLKSFTVEKGIYQTSNFRVQPTESIVRFPNITNLCPFGEVFNATRFASVYAWNRKRISNCVADYSVLYNSASFSTFKCYGVSPTKLNDLCFTNVYADSFVIRGDEVRQIAPGQTGKIADYNYKLPDDFTGCVIAWNSNNLDSKVGGNYNYLYRLFRKSNLKPFERDISTEIYQAGSTPCNGVEGFNCYFPLQSYGFQPTNGVGYQPYRVVVLSFELLHAPATVCGPKKSTPLVKNKCVNFNFNGLTGTGVLTESNKKFLPFQQFGRDIADITDAVRDPQTLEILDITPCSFGGVSVITPGTNTSNQVAVLYQDVNCTEVPVAIHADQLTPTWRVYSTGSNVFQTRAGCLIGAEHVNNSYECDIPIGAGICASYQTQTNSPRRARSVASQSIIAYTMSLGAENSVAYSNNSIAIPTNFTISVTTEILPVSMTKTSVDCTMYICGDSTECSNLLLQYGSFCTQLNRALTGIAVEQDKNTQEVFAQVKQIYKTPPIKDFGGFNFSQILPDPSKPSKRSFIEDLLFNKVTLADAGFIKQYGDCLGDIAARDLICAQKFNGLTVLPPLLTDEMIAQYTSALLAGTITCGWTFGAGACLQIPFAMQMAYRFNGIGVTQNVLYENQKLIANQFNSAIGKIQDSLSSTASALGKLQDVVNQNAQALNTLVKQLSSNFGAISSVLNDILSRLDPPEAEVQIDRLITGRLQSLQTYVTQQLIRAAEIRASANLAATKMSECVLGQSKRVDFCGKGYHLMSFPQSAPHGVVFLHVTYVPAQEKNFTTAPAICHDGKAHFPREGVFVSNGTHWFVTQRNFYEPQIITTDNTFVSGNCDVVIGIVNNTVYDPLQPELDSFKEELDKYFKNHTSPDVDLGDISGINASVVNIQKEIDRLNEVAKNLNESLIDLQELGKYEQYIKWPWYIWLGFIAGLIAIVMVTIMLCCMTSCCSCLKGCCSCGSCCKFDEDDSEPVLKGVKLHYT

SEQ ID NO: 379 - protein, 1273 aa, Artificial Sequence
  source: /note="Description of Artificial Sequence: Synthetic polypeptide"
MFVFLVLLPLVSSQCVNLTTRTQLPPAYTNSFTRGVYYPDKVFRSSVLHSTQDLFLPFFSNVTWFHAIHVSGTNGTKRFDNPVLPFNDGVYFASTEKSNIIRGWIFGTTLDSKTQSLLIVNNATNVVIKVCEFQFCNDPFLGVYYHKNNKSWMESEFRVYSSANNCTFEYVSQPFLMDLEGKQGNFKNLREFVFKNIDGYFKIYSKHTPINLVRDLPQGFSALEPLVDLPIGINITRFQTLLALHRSYLTPGDSSSGWTAGAAAYYVGYLQPRTFLLKYNENGTITDAVDCALDPLSETKCTLKSFTVEKGIYQTSNFRVQPTESIVRFPNITNLCPFGEVFNATRFASVYAWNRKRISNCVADYSVLYNSASFSTFKCYGVSPTKLNDLCFTNVYADSFVIRGDEVRQIAPGQTGKIADYNYKLPDDFTGCVIAWNSNNLDSKVGGNYNYLYRLFRKSNLKPFERDISTEIYQAGSTPCNGVEGFNCYFPLQSYGFQPTNGVGYQPYRVVVLSFELLHAPATVCGPKKSTNLVKNKCVNFNFNGLTGTGVLTESNKKFLPFQQFGRDIADITDAVRDPQTLEILDITPCSFGGVSVITPGTNTSNQVAVLYQNVNCTEVPVAIHADQLTPTWRVYSTGSNVFQTRAGCLIGAEHVNNSYECDIPIGAGICASYQTQTNSPRRARSVASQSIIAYTMSLGAENSVAYSNNSIAIPTNFTISVTTEILPVSMTKTSVDCTMYICGDSTECSNLLLQYGSFCTQLNRALTGIAVEQDKNTQEVFAQVKQIYKTPPIKDFGGFNFSQILPDPSKPSKRSFIEDLLFNKVTLADAGFIKQYGDCLGDIAARDLICAQKFNGLTVLPPLLTDEMIAQYTSALLAGTITSGWTFGAGPALQIPFAMQMAYRFNGIGVTQNVLYENQKLIANQFNSAIGKIQDSLSSTPSALGKLQDVVNQNAQALNTLVKQLSSNFGAISSVLNDILSRLDPPEAEVQIDRLITGRLQSLQTYVTQQLIRAAEIRASANLAATKMSECVLGQSKRVDFCGKGYHLMSFPQSAPHGVVFLHVTYVPAQEKNFTTAPAICHDGKAHFPREGVFVSNGTHWFVTQRNFYEPQIITTDNTFVSGNCDVVIGIVNNTVYDPLQPELDSFKEELDKYFKNHTSPDVDLGDISGINASVVNIQKEIDRLNEVAKNLNESLIDLQELGKYEQYIKWPWYIWLGFIAGLIAIVMVTIMLCCMTSCCSCLKGCCSCGSCCKFDEDDSEPVLKGVKLHYT

SEQ ID NO: 380 - protein, 1273 aa, Artificial Sequence
  source: /note="Description of Artificial Sequence: Synthetic polypeptide"
MFVFLVLLPLVSSQCVNLTTRTQLPPAYTNSFTRGVYYPDKVFRSSVLHSTQDLFLPFFSNVTWFHAIHVSGTNGTKRFDNPVLPFNDGVYFASTEKSNIIRGWIFGTTLDSKTQSLLIVNNATNVVIKVCEFQFCNDPFLGVYYHKNNKSWMESEFRVYSSANNCTFEYVSQPFLMDLEGKQGNFKNLREFVFKNIDGYFKIYSKHTPINLVRDLPQGFSALEPLVDLPIGINITRFQTLLALHRSYLTPGDSSSGWTAGAAAYYVGYLQPRTFLLKYNENGTITDAVDCALDPLSETKCTLKSFTVEKGIYQTSNFRVQPTESIVRFPNITNLCPFGEVFNATRFASVYAWNRKRISNCVADYSVLYNSASFSTFKCYGVSPTKLNDLCFTNVYADSFVIRGDEVRQIAPGQTGKIADYNYKLPDDFTGCVIAWNSNNLDSKVGGNYNYLYRLFRKSNLKPFERDISTEIYQAGSTPCNGVEGFNCYFPLQSYGFQPTNGVGYQPYRVVVLSFELLHAPATVCGPKKSTPLVKNKCVNFNFNGLTGTGVLTESNKKFLPFQQFGRDIADTTDAVRDPQTLEILDITPCSFGGVSVITPGTNTSNQVAVLYQNVNCTEVPVAIHADQLTPTWRVYSTGSNVFQTRAGCLIGAEHVNNSYECDIPIGAGICASYQTQTNSPRRARSVASQSIIAYTMSLGAENSVAYSNNSIAIPTNFTISVTTEILPVSMTKTSVDCTMYICGDSTECSNLLLQYGSFCTQLNRALTGIAVEQDKNTQEVFAQVKQIYKTPPIKDFGGFNFSQILPDPSKPSKRSFIEDLLFNKVTLADAGFIKQYGDCLGDIAARDLICAQKFNGLTVLPPLLTDEMIAQYTSALLAGTITSGWTFGAGPALQIPFAMQMAYRFNGIGVTQNVLYENQKLIANQFNSAIGKIQDSLSSTPSALGKLQDVVNQNAQALNTLVKQLSSNFGAISSVLNDILSRLDPPEAEVQIDRLITGRLQSLQTYVTQQLIRAAEIRASANLAATKMSECVLGQSKRVDFCGKGYHLMSFPQSAPHGVVFLHVTYVPAQEKNFTTAPAICHDGKAHFPREGVFVSNGTHWFVTQRNFYEPQIITTDNTFVSGNCDVVIGIVNNTVYDPLQPELDSFKEELDKYFKNHTSPDVDLGDISGINASVVNIQKEIDRLNEVAKNLNESLIDLQELGKYEQYIKWPWYIWLGFIAGLIAIVMVTIMLCCMTSCCSCLKGCCSCGSCCKFDEDDSEPVLKGVKLHYT

SEQ ID NO: 381 - protein, 1273 aa, Artificial Sequence
  source: /note="Description of Artificial Sequence: Synthetic polypeptide"
MFVFLVLLPLVSSQCVNLTTRTQLPPAYTNSFTRGVYYPDKVFRSSVLHSTQDLFLPFFSNVTWFHAIHVSGTNGTKRFDNPVLPFNDGVYFASTEKSNIIRGWIFGTTLDSKTQSLLIVNNATNVVIKVCEFQFCNDPFLGVYYHKNNKSWMESEFRVYSSANNCTFEYVSQPFLMDLEGKQGNFKNLREFVFKNIDGYFKIYSKHTPINLVRDLPQGFSALEPLVDLPIGINITRFQTLLALHRSYLTPGDSSSGWTAGAAAYYVGYLQPRTFLLKYNENGTITDAVDCALDPLSETKCTLKSFTVEKGIYQTSNFRVQPTESIVRFPNITNLCPFGEVFNATRFASVYAWNRKRISNCVADYSVLYNSASFSTFKCYGVSPTKLNDLCFTNVYADSFVIRGDEVRQIAPGQTGKIADYNYKLPDDFTGCVIAWNSNNLDSKVGGNYNYLYRLFRKSNLKPFERDISTEIYQAGSTPCNGVEGFNCYFPLQSYGFQPTNGVGYQPYRVVVLSFELLHAPATVCGPKKSTNLVKNKCVNFNFNGLTGTGVLTESNKKFLPFQQFGRDIADTTDAVRDPQTLEILDITPCSFGGVSVITPGTNTSNQVAVLYQNVNCTEVPVAIHADQLTPTWRVYSTGSNVFQTRAGCLIGAEHVNNSYECDIPIGAGICASYQTQTNSPRRARSVASQSIIAYTMSLGAENSVAYSNNSIAIPTNFTISVTTEILPVSMTKTSVDCTMYICGDSTECSNLLLQYGSFCTQLNRALTGIAVEQDKNTQEVFAQVKQIYKTPPIKDFGGFNFSQILPDPSKPSKRSFIEDLLFNKVTLADAGFIKQYGDCLGDIAARDLICAQKFNGLTVLPPLLTDEMIAQYTSALLACTITSGWTCGAGPALQIPFAMQMAYRFNGIGVTQNVLYENQKLIANQFNSAIGKIQDSLSSTPSALGKLQDVVNQNAQALNTLVKQLSSNFGAISSVLNDILSRLDPPEAEVQIDRLITGRLQSLQTYVTQQLIRAAEIRASANLAATKMSECVLGQSKRVDFCGKGYHLMSFPQSAPHGVVFLHVTYVPAQEKNFTTAPAICHDGKAHFPREGVFVSNGTHWFVTQRNFYEPQIITTDNTFVSGNCDVVIGIVNNTVYDPLQPELDSFKEELDKYFKNHTSPDVDLGDISGINASVVNIQKEIDRLNEVAKNLNESLIDLQELGKYEQYIKWPWYIWLGFIAGLIAIVMVTIMLCCMTSCCSCLKGCCSCGSCCKFDEDDSEPVLKGVKLHYT

SEQ ID NO: 382 - protein, 1273 aa, Artificial Sequence
  source: /note="Description of Artificial Sequence: Synthetic polypeptide"
MFVFLVLLPLVSSQCVNLTTRTQLPPAYTNSFTRGVYYPDKVFRSSVLHSTQDLFLPFFSNVTWFHAIHVSGTNGTKRFDNPVLPFNDGVYFASTEKSNIIRGWIFGTTLDSKTQSLLIVNNATNVVIKVCEFQFCNDPFLGVYYHKNNKSWMESEFRVYSSANNCTFEYVSQPFLMDLEGKQGNFKNLREFVFKNIDGYFKIYSKHTPINLVRDLPQGFSALEPLVDLPIGINITRFQTLLALHRSYLTPGDSSSGWTAGAAAYYVGYLQPRTFLLKYNENGTITDAVDCALDPLSETKCTLKSFTVEKGIYQTSNFRVQPTESIVRFPNITNLCPFGEVFNATRFASVYAWNRKRISNCVADYSVLYNSASFSTFKCYGVSPTKLNDLCFTNVYADSFVIRGDEVRQIAPGQTGKIADYNYKLPDDFTGCVIAWNSNNLDSKVGGNYNYLYRLFRKSNLKPFERDISTEIYQAGSTPCNGVEGFNCYFPLQSYGFQPTNGVGYQPYRVVVLSFELLHAPATVCGPKKSTNLVKNKCVNFNFNGLTGTGVLTESNKKFLPFQQFGRDIADTTDAVRDPQTLEILDITPCSFGGVSVITPGTNTSNQVAVLYQNVNCTEVPVAIHADQLTPTWRVYSTGSNVFQTRAGCLIGAEHVNNSYECDIPIGAGICASYQTQTNSPRRARSVASQSIIAYTMSLGAENSVAYSNNSIAIPTNFTISVTTEILPVSMTKTSVDCTMYICGDSTECSNLLLQYGSFCTQLNRALTGIAVEQDKNTQEVFAQVKQIYKTPPIKDFGGFNFSQILPDPSKPSKRSFIEDLLFNKVTLADAGFIKQYGDCLGDIAARDLICAQKFNGLTVLPPLLTDEMIAQYTSALLAGTITCGWTFGAGPCLQIPFAMQMAYRFNGIGVTQNVLYENQKLIANQFNSAIGKIQDSLSSTPSALGKLQDVVNQNAQALNTLVKQLSSNFGAISSVLNDILSRLDPPEAEVQIDRLITGRLQSLQTYVTQQLIRAAEIRASANLAATKMSECVLGQSKRVDFCGKGYHLMSFPQSAPHGVVFLHVTYVPAQEKNFTTAPAICHDGKAHFPREGVFVSNGTHWFVTQRNFYEPQIITTDNTFVSGNCDVVIGIVNNTVYDPLQPELDSFKEELDKYFKNHTSPDVDLGDISGINASVVNIQKEIDRLNEVAKNLNESLIDLQELGKYEQYIKWPWYIWLGFIAGLIAIVMVTIMLCCMTSCCSCLKGCCSCGSCCKFDEDDSEPVLKGVKLHYT

SEQ ID NO: 383 - protein, 1273 aa, Artificial Sequence
  source: /note="Description of Artificial Sequence: Synthetic polypeptide"
MFVFLVLLPLVSSQCVNLTTRTQLPPAYTNSFTRGVYYPDKVFRSSVLHSTQDLFLPFFSNVTWFHAIHVSGTNGTKRFDNPVLPFNDGVYFASTEKSNIIRGWIFGTTLDSKTQSLLIVNNATNVVIKVCEFQFCNDPFLGVYYHKNNKSWMESEFRVYSSANNCTFEYVSQPFLMDLEGKQGNFKNLREFVFKNIDGYFKIYSKHTPINLVRDLPQGFSALEPLVDLPIGINITRFQTLLALHRSYLTPGDSSSGWTAGAAAYYVGYLQPRTFLLKYNENGTITDAVDCALDPLSETKCTLKSFTVEKGIYQTSNFRVQPTESIVRFPNITNLCPFGEVFNATRFASVYAWNRKRISNCVADYSVLYNSASFSTFKCYGVSPTKLNDLCFTNVYADSFVIRGDEVRQIAPGQTGKIADYNYKLPDDFTGCVIAWNSNNLDSKVGGNYNYLYRLFRKSNLKPFERDISTEIYQAGSTPCNGVEGFNCYFPLQSYGFQPTNGVGYQPYRVVVLSFELLHAPATVCGPKKSTPLVKNKCVNFNFNGLTGTGVLTESNKKFLPFQQFGRDIADITDAVRDPQTLEILDITPCSFGGVSVITPGTNTSNQVAVLYQDVNCTEVPVAIHADQLTPTWRVYSTGSNVFQTRAGCLIGAEHVNNSYECDIPIGAGICASYQTQTNSPRRARSVASQSIIAYTMSLGAENSVAYSNNSIAIPTNFTISVTTEILPVSMTKTSVDCTMYICGDSTECSNLLLQYGSFCTQLNRALTGIAVEQDKNTQEVFAQVKQIYKTPPIKDFGGFNFSQILPDPSKPSKRSFIEDLLFNKVTLADAGFIKQYGDCLGDIAARDLICAQKFNGLTVLPPLLTDEMIAQYTSALLAGTITSGWTFGAGPALQIPFAMQMAYRFNGIGVTQNVLYENQKLIANQFNSAIGKIQDSLSSTPSALGKLQDVVNQNAQALNTLVKQLSSNFGAISSVLNDILSRLDPPEAEVQIDRLITGRLQSLQTYVTQQLIRAAEIRASANLAATKMSECVLGQSKRVDFCGKGYHLMSFPQSAPHGVVFLHVTYVPAQEKNFTTAPAICHDGKAHFPREGVFVSNGTHWFVTQRNFYEPQIITTDNTFVSGNCDVVIGIVNNTVYDPLQPELDSFKEELDKYFKNHTSPDVDLGDISGINASVVNIQKEIDRLNEVAKNLNESLIDLQELGKYEQYIKWPWYIWLGFIAGLIAIVMVTIMLCCMTSCCSCLKGCCSCGSCCKFDEDDSEPVLKGVKLHYT

SEQ ID NO: 384 - protein, 1273 aa, Artificial Sequence
  source: /note="Description of Artificial Sequence: Synthetic polypeptide"
MFVFLVLLPLVSSQCVNLTTRTQLPPAYTNSFTRGVYYPDKVFRSSVLHSTQDLFLPFFSNVTWFHAIHVSGTNGTKRFDNPVLPFNDGVYFASTEKSNIIRGWIFGTTLDSKTQSLLIVNNATNVVIKVCEFQFCNDPFLGVYYHKNNKSWMESEFRVYSSANNCTFEYVSQPFLMDLEGKQGNFKNLREFVFKNIDGYFKIYSKHTPINLVRDLPQGFSALEPLVDLPIGINITRFQTLLALHRSYLTPGDSSSGWTAGAAAYYVGYLQPRTFLLKYNENGTITDAVDCALDPLSETKCTLKSFTVEKGIYQTSNFRVQPTESIVRFPNITNLCPFGEVFNATRFASVYAWNRKRISNCVADYSVLYNSASFSTFKCYGVSPTKLNDLCFTNVYADSFVIRGDEVRQIAPGQTGKIADYNYKLPDDFTGCVIAWNSNNLDSKVGGNYNYLYRLFRKSNLKPFERDISTEIYQAGSTPCNGVEGFNCYFPLQSYGFQPTNGVGYQPYRVVVLSFELLHAPATVCGPKKSTNLVKNKCVNFNFNGLTGTGVLTESNKKFLPFQQFGRDIADITDAVRDPQTLEILDITPCSFGGVSVITPGTNTSNQVAVLYQDVNCTEVPVAIHADQLTPTWRVYSTGSNVFQTRAGCLIGAEHVNNSYECDIPIGAGICASYQTQTNSPRRARSVASQSIIAYTMSLGAENSVAYSNNSIAIPTNFTISVTTEILPVSMTKTSVDCTMYICGDSTECSNLLLQYGSFCTQLNRALTGIAVEQDKNTQEVFAQVKQIYKTPPIKDFGGFNFSQILPDPSKPSKRSFIEDLLFNKVTLADAGFIKQYGDCLGDIAARDLICAQKFNGLTVLPPLLTDEMIAQYTSALLACTITSGWTCGAGPALQIPFAMQMAYRFNGIGVTQNVLYENQKLIANQFNSAIGKIQDSLSSTPSALGKLQDVVNQNAQALNTLVKQLSSNFGAISSVLNDILSRLDPPEAEVQIDRLITGRLQSLQTYVTQQLIRAAEIRASANLAATKMSECVLGQSKRVDFCGKGYHLMSFPQSAPHGVVFLHVTYVPAQEKNFTTAPAICHDGKAHFPREGVFVSNGTHWFVTQRNFYEPQIITTDNTFVSGNCDVVIGIVNNTVYDPLQPELDSFKEELDKYFKNHTSPDVDLGDISGINASVVNIQKEIDRLNEVAKNLNESLIDLQELGKYEQYIKWPWYIWLGFIAGLIAIVMVTIMLCCMTSCCSCLKGCCSCGSCCKFDEDDSEPVLKGVKLHYT

SEQ ID NO: 385 - protein, 1273 aa, Artificial Sequence
  source: /note="Description of Artificial Sequence: Synthetic polypeptide"
MFVFLVLLPLVSSQCVNLTTRTQLPPAYTNSFTRGVYYPDKVFRSSVLHSTQDLFLPFFSNVTWFHAIHVSGTNGTKRFDNPVLPFNDGVYFASTEKSNIIRGWIFGTTLDSKTQSLLIVNNATNVVIKVCEFQFCNDPFLGVYYHKNNKSWMESEFRVYSSANNCTFEYVSQPFLMDLEGKQGNFKNLREFVFKNIDGYFKIYSKHTPINLVRDLPQGFSALEPLVDLPIGINITRFQTLLALHRSYLTPGDSSSGWTAGAAAYYVGYLQPRTFLLKYNENGTITDAVDCALDPLSETKCTLKSFTVEKGIYQTSNFRVQPTESIVRFPNITNLCPFGEVFNATRFASVYAWNRKRISNCVADYSVLYNSASFSTFKCYGVSPTKLNDLCFTNVYADSFVIRGDEVRQIAPGQTGKIADYNYKLPDDFTGCVIAWNSNNLDSKVGGNYNYLYRLFRKSNLKPFERDISTEIYQAGSTPCNGVEGFNCYFPLQSYGFQPTNGVGYQPYRVVVLSFELLHAPATVCGPKKSTNLVKNKCVNFNFNGLTGTGVLTESNKKFLPFQQFGRDIADITDAVRDPQTLEILDITPCSFGGVSVITPGTNTSNQVAVLYQDVNCTEVPVAIHADQLTPTWRVYSTGSNVFQTRAGCLIGAEHVNNSYECDIPIGAGICASYQTQTNSPRRARSVASQSIIAYTMSLGAENSVAYSNNSIAIPTNFTISVTTEILPVSMTKTSVDCTMYICGDSTECSNLLLQYGSFCTQLNRALTGIAVEQDKNTQEVFAQVKQIYKTPPIKDFGGFNFSQILPDPSKPSKRSFIEDLLFNKVTLADAGFIKQYGDCLGDIAARDLICAQKFNGLTVLPPLLTDEMIAQYTSALLAGTITCGWTFGAGPCLQIPFAMQMAYRFNGIGVTQNVLYENQKLIANQFNSAIGKIQDSLSSTPSALGKLQDVVNQNAQALNTLVKQLSSNFGAISSVLNDILSRLDPPEAEVQIDRLITGRLQSLQTYVTQQLIRAAEIRASANLAATKMSECVLGQSKRVDFCGKGYHLMSFPQSAPHGVVFLHVTYVPAQEKNFTTAPAICHDGKAHFPREGVFVSNGTHWFVTQRNFYEPQIITTDNTFVSGNCDVVIGIVNNTVYDPLQPELDSFKEELDKYFKNHTSPDVDLGDISGINASVVNIQKEIDRLNEVAKNLNESLIDLQELGKYEQYIKWPWYIWLGFIAGLIAIVMVTIMLCCMTSCCSCLKGCCSCGSCCKFDEDDSEPVLKGVKLHYT

SEQ ID NO: 386 - protein, 1273 aa, Artificial Sequence
  source: /note="Description of Artificial Sequence: Synthetic polypeptide"
MFVFLVLLPLVSSQCVNLTTRTQLPPAYTNSFTRGVYYPDKVFRSSVLHSTQDLFLPFFSNVTWFHAIHVSGTNGTKRFDNPVLPFNDGVYFASTEKSNIIRGWIFGTTLDSKTQSLLIVNNATNVVIKVCEFQFCNDPFLGVYYHKNNKSWMESEFRVYSSANNCTFEYVSQPFLMDLEGKQGNFKNLREFVFKNIDGYFKIYSKHTPINLVRDLPQGFSALEPLVDLPIGINITRFQTLLALHRSYLTPGDSSSGWTAGAAAYYVGYLQPRTFLLKYNENGTITDAVDCALDPLSETKCTLKSFTVEKGIYQTSNFRVQPTESIVRFPNITNLCPFGEVFNATRFASVYAWNRKRISNCVADYSVLYNSASFSTFKCYGVSPTKLNDLCFTNVYADSFVIRGDEVRQIAPGQTGKIADYNYKLPDDFTGCVIAWNSNNLDSKVGGNYNYLYRLFRKSNLKPFERDISTEIYQAGSTPCNGVEGFNCYFPLQSYGFQPTNGVGYQPYRVVVLSFELLHAPATVCGPKKSTPLVKNKCVNFNFNGLTGTGVLTESNKKFLPFQQFGRDIADTTDAVRDPQTLEILDITPCSFGGVSVITPGTNTSNQVAVLYQDVNCTEVPVAIHADQLTPTWRVYSTGSNVFQTRAGCLIGAEHVNNSYECDIPIGAGICASYQTQTNSPRRARSVASQSIIAYTMSLGAENSVAYSNNSIAIPTNFTISVTTEILPVSMTKTSVDCTMYICGDSTECSNLLLQYGSFCTQLNRALTGIAVEQDKNTQEVFAQVKQIYKTPPIKDFGGFNFSQILPDPSKPSKRSFIEDLLFNKVTLADAGFIKQYGDCLGDIAARDLICAQKFNGLTVLPPLLTDEMIAQYTSALLACTITSGWTCGAGPALQIPFAMQMAYRFNGIGVTQNVLYENQKLIANQFNSAIGKIQDSLSSTPSALGKLQDVVNQNAQALNTLVKQLSSNFGAISSVLNDILSRLDPPEAEVQIDRLITGRLQSLQTYVTQQLIRAAEIRASANLAATKMSECVLGQSKRVDFCGKGYHLMSFPQSAPHGVVFLHVTYVPAQEKNFTTAPAICHDGKAHFPREGVFVSNGTHWFVTQRNFYEPQIITTDNTFVSGNCDVVIGIVNNTVYDPLQPELDSFKEELDKYFKNHTSPDVDLGDISGINASVVNIQKEIDRLNEVAKNLNESLIDLQELGKYEQYIKWPWYIWLGFIAGLIAIVMVTIMLCCMTSCCSCLKGCCSCGSCCKFDEDDSEPVLKGVKLHYT

SEQ ID NO: 387 - protein, 1273 aa, Artificial Sequence
  source: /note="Description of Artificial Sequence: Synthetic polypeptide"
MFVFLVLLPLVSSQCVNLTTRTQLPPAYTNSFTRGVYYPDKVFRSSVLHSTQDLFLPFFSNVTWFHAIHVSGTNGTKRFDNPVLPFNDGVYFASTEKSNIIRGWIFGTTLDSKTQSLLIVNNATNVVIKVCEFQFCNDPFLGVYYHKNNKSWMESEFRVYSSANNCTFEYVSQPFLMDLEGKQGNFKNLREFVFKNIDGYFKIYSKHTPINLVRDLPQGFSALEPLVDLPIGINITRFQTLLALHRSYLTPGDSSSGWTAGAAAYYVGYLQPRTFLLKYNENGTITDAVDCALDPLSETKCTLKSFTVEKGIYQTSNFRVQPTESIVRFPNITNLCPFGEVFNATRFASVYAWNRKRISNCVADYSVLYNSASFSTFKCYGVSPTKLNDLCFTNVYADSFVIRGDEVRQIAPGQTGKIADYNYKLPDDFTGCVIAWNSNNLDSKVGGNYNYLYRLFRKSNLKPFERDISTEIYQAGSTPCNGVEGFNCYFPLQSYGFQPTNGVGYQPYRVVVLSFELLHAPATVCGPKKSTPLVKNKCVNFNFNGLTGTGVLTESNKKFLPFQQFGRDIADTTDAVRDPQTLEILDITPCSFGGVSVITPGTNTSNQVAVLYQDVNCTEVPVAIHADQLTPTWRVYSTGSNVFQTRAGCLIGAEHVNNSYECDIPIGAGICASYQTQTNSPRRARSVASQSIIAYTMSLGAENSVAYSNNSIAIPTNFTISVTTEILPVSMTKTSVDCTMYICGDSTECSNLLLQYGSFCTQLNRALTGIAVEQDKNTQEVFAQVKQIYKTPPIKDFGGFNFSQILPDPSKPSKRSFIEDLLFNKVTLADAGFIKQYGDCLGDIAARDLICAQKFNGLTVLPPLLTDEMIAQYTSALLAGTITCGWTFGAGPCLQIPFAMQMAYRFNGIGVTQNVLYENQKLIANQFNSAIGKIQDSLSSTPSALGKLQDVVNQNAQALNTLVKQLSSNFGAISSVLNDILSRLDPPEAEVQIDRLITGRLQSLQTYVTQQLIRAAEIRASANLAATKMSECVLGQSKRVDFCGKGYHLMSFPQSAPHGVVFLHVTYVPAQEKNFTTAPAICHDGKAHFPREGVFVSNGTHWFVTQRNFYEPQIITTDNTFVSGNCDVVIGIVNNTVYDPLQPELDSFKEELDKYFKNHTSPDVDLGDISGINASVVNIQKEIDRLNEVAKNLNESLIDLQELGKYEQYIKWPWYIWLGFIAGLIAIVMVTIMLCCMTSCCSCLKGCCSCGSCCKFDEDDSEPVLKGVKLHYT

SEQ ID NO: 388 - protein, 1273 aa, Artificial Sequence
  source: /note="Description of Artificial Sequence: Synthetic polypeptide"
MFVFLVLLPLVSSQCVNLTTRTQLPPAYTNSFTRGVYYPDKVFRSSVLHSTQDLFLPFFSNVTWFHAIHVSGTNGTKRFDNPVLPFNDGVYFASTEKSNIIRGWIFGTTLDSKTQSLLIVNNATNVVIKVCEFQFCNDPFLGVYYHKNNKSWMESEFRVYSSANNCTFEYVSQPFLMDLEGKQGNFKNLREFVFKNIDGYFKIYSKHTPINLVRDLPQGFSALEPLVDLPIGINITRFQTLLALHRSYLTPGDSSSGWTAGAAAYYVGYLQPRTFLLKYNENGTITDAVDCALDPLSETKCTLKSFTVEKGIYQTSNFRVQPTESIVRFPNITNLCPFGEVFNATRFASVYAWNRKRISNCVADYSVLYNSASFSTFKCYGVSPTKLNDLCFTNVYADSFVIRGDEVRQIAPGQTGKIADYNYKLPDDFTGCVIAWNSNNLDSKVGGNYNYLYRLFRKSNLKPFERDISTEIYQAGSTPCNGVEGFNCYFPLQSYGFQPTNGVGYQPYRVVVLSFELLHAPATVCGPKKSTPLVKNKCVNFNFNGLTGTGVLTESNKKFLPFQQFGRDIADITDAVRDPQTLEILDITPCSFGGVSVITPGTNTSNQVAVLYQNVNCTEVPVAIHADQLTPTWRVYSTGSNVFQTRAGCLIGAEHVNNSYECDIPIGAGICASYQTQTNSPRRARSVASQSIIAYTMSLGAENSVAYSNNSIAIPTNFTISVTTEILPVSMTKTSVDCTMYICGDSTECSNLLLQYGSFCTQLNRALTGIAVEQDKNTQEVFAQVKQIYKTPPIKDFGGFNFSQILPDPSKPSKRSFIEDLLFNKVTLADAGFIKQYGDCLGDIAARDLICAQKFNGLTVLPPLLTDEMIAQYTSALLAGTITSGWTFGAGAALQIPFAMQMAYRFNGIGVTQNVLYENQKLIANQFNSAIGKIQDSLSSTPSALGKLQDVVNQNAQALNTLVKQLSSNFGAISSVLNDILSRLDPPEAEVQIDRLITGRLQSLQTYVTQQLIRAAEIRASANLAATKMSECVLGQSKRVDFCGKGYHLMSFPQSAPHGVVFLHVTYVPAQEKNFTTAPAICHDGKAHFPREGVFVSNGTHWFVTQRNFYEPQIITTDNTFVSGNCDVVIGIVNNTVYDPLQPELDSFKEELDKYFKNHTSPDVDLGDISGINASVVNIQKEIDRLNEVAKNLNESLIDLQELGKYEQYIKWPWYIWLGFIAGLIAIVMVTIMLCCMTSCCSCLKGCCSCGSCCKFDEDDSEPVLKGVKLHYT

SEQ ID NO: 389 - protein, 1273 aa, Artificial Sequence
  source: /note="Description of Artificial Sequence: Synthetic polypeptide"
MFVFLVLLPLVSSQCVNLTTRTQLPPAYTNSFTRGVYYPDKVFRSSVLHSTQDLFLPFFSNVTWFHAIHVSGTNGTKRFDNPVLPFNDGVYFASTEKSNIIRGWIFGTTLDSKTQSLLIVNNATNVVIKVCEFQFCNDPFLGVYYHKNNKSWMESEFRVYSSANNCTFEYVSQPFLMDLEGKQGNFKNLREFVFKNIDGYFKIYSKHTPINLVRDLPQGFSALEPLVDLPIGINITRFQTLLALHRSYLTPGDSSSGWTAGAAAYYVGYLQPRTFLLKYNENGTITDAVDCALDPLSETKCTLKSFTVEKGIYQTSNFRVQPTESIVRFPNITNLCPFGEVFNATRFASVYAWNRKRISNCVADYSVLYNSASFSTFKCYGVSPTKLNDLCFTNVYADSFVIRGDEVRQIAPGQTGKIADYNYKLPDDFTGCVIAWNSNNLDSKVGGNYNYLYRLFRKSNLKPFERDISTEIYQAGSTPCNGVEGFNCYFPLQSYGFQPTNGVGYQPYRVVVLSFELLHAPATVCGPKKSTNLVKNKCVNFNFNGLTGTGVLTESNKKFLPFQQFGRDIADITDAVRDPQTLEILDITPCSFGGVSVITPGTNTSNQVAVLYQNVNCTEVPVAIHADQLTPTWRVYSTGSNVFQTRAGCLIGAEHVNNSYECDIPIGAGICASYQTQTNSPRRARSVASQSIIAYTMSLGAENSVAYSNNSIAIPTNFTISVTTEILPVSMTKTSVDCTMYICGDSTECSNLLLQYGSFCTQLNRALTGIAVEQDKNTQEVFAQVKQIYKTPPIKDFGGFNFSQILPDPSKPSKRSFIEDLLFNKVTLADAGFIKQYGDCLGDIAARDLICAQKFNGLTVLPPLLTDEMIAQYTSALLACTITSGWTCGAGAALQIPFAMQMAYRFNGIGVTQNVLYENQKLIANQFNSAIGKIQDSLSSTPSALGKLQDVVNQNAQALNTLVKQLSSNFGAISSVLNDILSRLDPPEAEVQIDRLITGRLQSLQTYVTQQLIRAAEIRASANLAATKMSECVLGQSKRVDFCGKGYHLMSFPQSAPHGVVFLHVTYVPAQEKNFTTAPAICHDGKAHFPREGVFVSNGTHWFVTQRNFYEPQIITTDNTFVSGNCDVVIGIVNNTVYDPLQPELDSFKEELDKYFKNHTSPDVDLGDISGINASVVNIQKEIDRLNEVAKNLNESLIDLQELGKYEQYIKWPWYIWLGFIAGLIAIVMVTIMLCCMTSCCSCLKGCCSCGSCCKFDEDDSEPVLKGVKLHYT

SEQ ID NO: 390 - protein, 1273 aa, Artificial Sequence
  source: /note="Description of Artificial Sequence: Synthetic polypeptide"
MFVFLVLLPLVSSQCVNLTTRTQLPPAYTNSFTRGVYYPDKVFRSSVLHSTQDLFLPFFSNVTWFHAIHVSGTNGTKRFDNPVLPFNDGVYFASTEKSNIIRGWIFGTTLDSKTQSLLIVNNATNVVIKVCEFQFCNDPFLGVYYHKNNKSWMESEFRVYSSANNCTFEYVSQPFLMDLEGKQGNFKNLREFVFKNIDGYFKIYSKHTPINLVRDLPQGFSALEPLVDLPIGINITRFQTLLALHRSYLTPGDSSSGWTAGAAAYYVGYLQPRTFLLKYNENGTITDAVDCALDPLSETKCTLKSFTVEKGIYQTSNFRVQPTESIVRFPNITNLCPFGEVFNATRFASVYAWNRKRISNCVADYSVLYNSASFSTFKCYGVSPTKLNDLCFTNVYADSFVIRGDEVRQIAPGQTGKIADYNYKLPDDFTGCVIAWNSNNLDSKVGGNYNYLYRLFRKSNLKPFERDISTEIYQAGSTPCNGVEGFNCYFPLQSYGFQPTNGVGYQPYRVVVLSFELLHAPATVCGPKKSTNLVKNKCVNFNFNGLTGTGVLTESNKKFLPFQQFGRDIADITDAVRDPQTLEILDITPCSFGGVSVITPGTNTSNQVAVLYQNVNCTEVPVAIHADQLTPTWRVYSTGSNVFQTRAGCLIGAEHVNNSYECDIPIGAGICASYQTQTNSPRRARSVASQSIIAYTMSLGAENSVAYSNNSIAIPTNFTISVTTEILPVSMTKTSVDCTMYICGDSTECSNLLLQYGSFCTQLNRALTGIAVEQDKNTQEVFAQVKQIYKTPPIKDFGGFNFSQILPDPSKPSKRSFIEDLLFNKVTLADAGFIKQYGDCLGDIAARDLICAQKFNGLTVLPPLLTDEMIAQYTSALLAGTITCGWTFGAGACLQIPFAMQMAYRFNGIGVTQNVLYENQKLIANQFNSAIGKIQDSLSSTPSALGKLQDVVNQNAQALNTLVKQLSSNFGAISSVLNDILSRLDPPEAEVQIDRLITGRLQSLQTYVTQQLIRAAEIRASANLAATKMSECVLGQSKRVDFCGKGYHLMSFPQSAPHGVVFLHVTYVPAQEKNFTTAPAICHDGKAHFPREGVFVSNGTHWFVTQRNFYEPQIITTDNTFVSGNCDVVIGIVNNTVYDPLQPELDSFKEELDKYFKNHTSPDVDLGDISGINASVVNIQKEIDRLNEVAKNLNESLIDLQELGKYEQYIKWPWYIWLGFIAGLIAIVMVTIMLCCMTSCCSCLKGCCSCGSCCKFDEDDSEPVLKGVKLHYT

SEQ ID NO: 391 - protein, 1273 aa, Artificial Sequence
  source: /note="Description of Artificial Sequence: Synthetic polypeptide"
MFVFLVLLPLVSSQCVNLTTRTQLPPAYTNSFTRGVYYPDKVFRSSVLHSTQDLFLPFFSNVTWFHAIHVSGTNGTKRFDNPVLPFNDGVYFASTEKSNIIRGWIFGTTLDSKTQSLLIVNNATNVVIKVCEFQFCNDPFLGVYYHKNNKSWMESEFRVYSSANNCTFEYVSQPFLMDLEGKQGNFKNLREFVFKNIDGYFKIYSKHTPINLVRDLPQGFSALEPLVDLPIGINITRFQTLLALHRSYLTPGDSSSGWTAGAAAYYVGYLQPRTFLLKYNENGTITDAVDCALDPLSETKCTLKSFTVEKGIYQTSNFRVQPTESIVRFPNITNLCPFGEVFNATRFASVYAWNRKRISNCVADYSVLYNSASFSTFKCYGVSPTKLNDLCFTNVYADSFVIRGDEVRQIAPGQTGKIADYNYKLPDDFTGCVIAWNSNNLDSKVGGNYNYLYRLFRKSNLKPFERDISTEIYQAGSTPCNGVEGFNCYFPLQSYGFQPTNGVGYQPYRVVVLSFELLHAPATVCGPKKSTPLVKNKCVNFNFNGLTGTGVLTESNKKFLPFQQFGRDIADTTDAVRDPQTLEILDITPCSFGGVSVITPGTNTSNQVAVLYQNVNCTEVPVAIHADQLTPTWRVYSTGSNVFQTRAGCLIGAEHVNNSYECDIPIGAGICASYQTQTNSPRRARSVASQSIIAYTMSLGAENSVAYSNNSIAIPTNFTISVTTEILPVSMTKTSVDCTMYICGDSTECSNLLLQYGSFCTQLNRALTGIAVEQDKNTQEVFAQVKQIYKTPPIKDFGGFNFSQILPDPSKPSKRSFIEDLLFNKVTLADAGFIKQYGDCLGDIAARDLICAQKFNGLTVLPPLLTDEMIAQYTSALLACTITSGWTCGAGAALQIPFAMQMAYRFNGIGVTQNVLYENQKLIANQFNSAIGKIQDSLSSTPSALGKLQDVVNQNAQALNTLVKQLSSNFGAISSVLNDILSRLDPPEAEVQIDRLITGRLQSLQTYVTQQLIRAAEIRASANLAATKMSECVLGQSKRVDFCGKGYHLMSFPQSAPHGVVFLHVTYVPAQEKNFTTAPAICHDGKAHFPREGVFVSNGTHWFVTQRNFYEPQIITTDNTFVSGNCDVVIGIVNNTVYDPLQPELDSFKEELDKYFKNHTSPDVDLGDISGINASVVNIQKEIDRLNEVAKNLNESLIDLQELGKYEQYIKWPWYIWLGFIAGLIAIVMVTIMLCCMTSCCSCLKGCCSCGSCCKFDEDDSEPVLKGVKLHYT

SEQ ID NO: 392 - protein, 1273 aa, Artificial Sequence
  source: /note="Description of Artificial Sequence: Synthetic polypeptide"
MFVFLVLLPLVSSQCVNLTTRTQLPPAYTNSFTRGVYYPDKVFRSSVLHSTQDLFLPFFSNVTWFHAIHVSGTNGTKRFDNPVLPFNDGVYFASTEKSNIIRGWIFGTTLDSKTQSLLIVNNATNVVIKVCEFQFCNDPFLGVYYHKNNKSWMESEFRVYSSANNCTFEYVSQPFLMDLEGKQGNFKNLREFVFKNIDGYFKIYSKHTPINLVRDLPQGFSALEPLVDLPIGINITRFQTLLALHRSYLTPGDSSSGWTAGAAAYYVGYLQPRTFLLKYNENGTITDAVDCALDPLSETKCTLKSFTVEKGIYQTSNFRVQPTESIVRFPNITNLCPFGEVFNATRFASVYAWNRKRISNCVADYSVLYNSASFSTFKCYGVSPTKLNDLCFTNVYADSFVIRGDEVRQIAPGQTGKIADYNYKLPDDFTGCVIAWNSNNLDSKVGGNYNYLYRLFRKSNLKPFERDISTEIYQAGSTPCNGVEGFNCYFPLQSYGFQPTNGVGYQPYRVVVLSFELLHAPATVCGPKKSTPLVKNKCVNFNFNGLTGTGVLTESNKKFLPFQQFGRDIADTTDAVRDPQTLEILDITPCSFGGVSVITPGTNTSNQVAVLYQNVNCTEVPVAIHADQLTPTWRVYSTGSNVFQTRAGCLIGAEHVNNSYECDIPIGAGICASYQTQTNSPRRARSVASQSIIAYTMSLGAENSVAYSNNSIAIPTNFTISVTTEILPVSMTKTSVDCTMYICGDSTECSNLLLQYGSFCTQLNRALTGIAVEQDKNTQEVFAQVKQIYKTPPIKDFGGFNFSQILPDPSKPSKRSFIEDLLFNKVTLADAGFIKQYGDCLGDIAARDLICAQKFNGLTVLPPLLTDEMIAQYTSALLAGTITCGWTFGAGACLQIPFAMQMAYRFNGIGVTQNVLYENQKLIANQFNSAIGKIQDSLSSTPSALGKLQDVVNQNAQALNTLVKQLSSNFGAISSVLNDILSRLDPPEAEVQIDRLITGRLQSLQTYVTQQLIRAAEIRASANLAATKMSECVLGQSKRVDFCGKGYHLMSFPQSAPHGVVFLHVTYVPAQEKNFTTAPAICHDGKAHFPREGVFVSNGTHWFVTQRNFYEPQIITTDNTFVSGNCDVVIGIVNNTVYDPLQPELDSFKEELDKYFKNHTSPDVDLGDISGINASVVNIQKEIDRLNEVAKNLNESLIDLQELGKYEQYIKWPWYIWLGFIAGLIAIVMVTIMLCCMTSCCSCLKGCCSCGSCCKFDEDDSEPVLKGVKLHYT

SEQ ID NO: 393 - protein, 1273 aa, Artificial Sequence
  source: /note="Description of Artificial Sequence: Synthetic polypeptide"
MFVFLVLLPLVSSQCVNLTTRTQLPPAYTNSFTRGVYYPDKVFRSSVLHSTQDLFLPFFSNVTWFHAIHVSGTNGTKRFDNPVLPFNDGVYFASTEKSNIIRGWIFGTTLDSKTQSLLIVNNATNVVIKVCEFQFCNDPFLGVYYHKNNKSWMESEFRVYSSANNCTFEYVSQPFLMDLEGKQGNFKNLREFVFKNIDGYFKIYSKHTPINLVRDLPQGFSALEPLVDLPIGINITRFQTLLALHRSYLTPGDSSSGWTAGAAAYYVGYLQPRTFLLKYNENGTITDAVDCALDPLSETKCTLKSFTVEKGIYQTSNFRVQPTESIVRFPNITNLCPFGEVFNATRFASVYAWNRKRISNCVADYSVLYNSASFSTFKCYGVSPTKLNDLCFTNVYADSFVIRGDEVRQIAPGQTGKIADYNYKLPDDFTGCVIAWNSNNLDSKVGGNYNYLYRLFRKSNLKPFERDISTEIYQAGSTPCNGVEGFNCYFPLQSYGFQPTNGVGYQPYRVVVLSFELLHAPATVCGPKKSTPLVKNKCVNFNFNGLTGTGVLTESNKKFLPFQQFGRDIADITDAVRDPQTLEILDITPCSFGGVSVITPGTNTSNQVAVLYQDVNCTEVPVAIHADQLTPTWRVYSTGSNVFQTRAGCLIGAEHVNNSYECDIPIGAGICASYQTQTNSPRRARSVASQSIIAYTMSLGAENSVAYSNNSIAIPTNFTISVTTEILPVSMTKTSVDCTMYICGDSTECSNLLLQYGSFCTQLNRALTGIAVEQDKNTQEVFAQVKQIYKTPPIKDFGGFNFSQILPDPSKPSKRSFIEDLLFNKVTLADAGFIKQYGDCLGDIAARDLICAQKFNGLTVLPPLLTDEMIAQYTSALLACTITSGWTCGAGAALQIPFAMQMAYRFNGIGVTQNVLYENQKLIANQFNSAIGKIQDSLSSTPSALGKLQDVVNQNAQALNTLVKQLSSNFGAISSVLNDILSRLDPPEAEVQIDRLITGRLQSLQTYVTQQLIRAAEIRASANLAATKMSECVLGQSKRVDFCGKGYHLMSFPQSAPHGVVFLHVTYVPAQEKNFTTAPAICHDGKAHFPREGVFVSNGTHWFVTQRNFYEPQIITTDNTFVSGNCDVVIGIVNNTVYDPLQPELDSFKEELDKYFKNHTSPDVDLGDISGINASVVNIQKEIDRLNEVAKNLNESLIDLQELGKYEQYIKWPWYIWLGFIAGLIAIVMVTIMLCCMTSCCSCLKGCCSCGSCCKFDEDDSEPVLKGVKLHYT

SEQ ID NO: 394 - protein, 1273 aa, Artificial Sequence
  source: /note="Description of Artificial Sequence: Synthetic polypeptide"
MFVFLVLLPLVSSQCVNLTTRTQLPPAYTNSFTRGVYYPDKVFRSSVLHSTQDLFLPFFSNVTWFHAIHVSGTNGTKRFDNPVLPFNDGVYFASTEKSNIIRGWIFGTTLDSKTQSLLIVNNATNVVIKVCEFQFCNDPFLGVYYHKNNKSWMESEFRVYSSANNCTFEYVSQPFLMDLEGKQGNFKNLREFVFKNIDGYFKIYSKHTPINLVRDLPQGFSALEPLVDLPIGINITRFQTLLALHRSYLTPGDSSSGWTAGAAAYYVGYLQPRTFLLKYNENGTITDAVDCALDPLSETKCTLKSFTVEKGIYQTSNFRVQPTESIVRFPNITNLCPFGEVFNATRFASVYAWNRKRISNCVADYSVLYNSASFSTFKCYGVSPTKLNDLCFTNVYADSFVIRGDEVRQIAPGQTGKIADYNYKLPDDFTGCVIAWNSNNLDSKVGGNYNYLYRLFRKSNLKPFERDISTEIYQAGSTPCNGVEGFNCYFPLQSYGFQPTNGVGYQPYRVVVLSFELLHAPATVCGPKKSTPLVKNKCVNFNFNGLTGTGVLTESNKKFLPFQQFGRDIADITDAVRDPQTLEILDITPCSFGGVSVITPGTNTSNQVAVLYQDVNCTEVPVAIHADQLTPTWRVYSTGSNVFQTRAGCLIGAEHVNNSYECDIPIGAGICASYQTQTNSPRRARSVASQSIIAYTMSLGAENSVAYSNNSIAIPTNFTISVTTEILPVSMTKTSVDCTMYICGDSTECSNLLLQYGSFCTQLNRALTGIAVEQDKNTQEVFAQVKQIYKTPPIKDFGGFNFSQILPDPSKPSKRSFIEDLLFNKVTLADAGFIKQYGDCLGDIAARDLICAQKFNGLTVLPPLLTDEMIAQYTSALLAGTITCGWTFGAGACLQIPFAMQMAYRFNGIGVTQNVLYENQKLIANQFNSAIGKIQDSLSSTPSALGKLQDVVNQNAQALNTLVKQLSSNFGAISSVLNDILSRLDPPEAEVQIDRLITGRLQSLQTYVTQQLIRAAEIRASANLAATKMSECVLGQSKRVDFCGKGYHLMSFPQSAPHGVVFLHVTYVPAQEKNFTTAPAICHDGKAHFPREGVFVSNGTHWFVTQRNFYEPQIITTDNTFVSGNCDVVIGIVNNTVYDPLQPELDSFKEELDKYFKNHTSPDVDLGDISGINASVVNIQKEIDRLNEVAKNLNESLIDLQELGKYEQYIKWPWYIWLGFIAGLIAIVMVTIMLCCMTSCCSCLKGCCSCGSCCKFDEDDSEPVLKGVKLHYT

SEQ ID NO: 395 - protein, 1273 aa, Artificial Sequence
  source: /note="Description of Artificial Sequence: Synthetic polypeptide"
MFVFLVLLPLVSSQCVNLTTRTQLPPAYTNSFTRGVYYPDKVFRSSVLHSTQDLFLPFFSNVTWFHAIHVSGTNGTKRFDNPVLPFNDGVYFASTEKSNIIRGWIFGTTLDSKTQSLLIVNNATNVVIKVCEFQFCNDPFLGVYYHKNNKSWMESEFRVYSSANNCTFEYVSQPFLMDLEGKQGNFKNLREFVFKNIDGYFKIYSKHTPINLVRDLPQGFSALEPLVDLPIGINITRFQTLLALHRSYLTPGDSSSGWTAGAAAYYVGYLQPRTFLLKYNENGTITDAVDCALDPLSETKCTLKSFTVEKGIYQTSNFRVQPTESIVRFPNITNLCPFGEVFNATRFASVYAWNRKRISNCVADYSVLYNSASFSTFKCYGVSPTKLNDLCFTNVYADSFVIRGDEVRQIAPGQTGKIADYNYKLPDDFTGCVIAWNSNNLDSKVGGNYNYLYRLFRKSNLKPFERDISTEIYQAGSTPCNGVEGFNCYFPLQSYGFQPTNGVGYQPYRVVVLSFELLHAPATVCGPKKSTPLVKNKCVNFNFNGLTGTGVLTESNKKFLPFQQFGRDIADITDAVRDPQTLEILDITPCSFGGVSVITPGTNTSNQVAVLYQNVNCTEVPVAIHADQLTPTWRVYSTGSNVFQTRAGCLIGAEHVNNSYECDIPIGAGICASYQTQTNSPRRARSVASQSIIAYTMSLGAENSVAYSNNSIAIPTNFTISVTTEILPVSMTKTSVDCTMYICGDSTECSNLLLQYGSFCTQLNRALTGIAVEQDKNTQEVFAQVKQIYKTPPIKDFGGFNFSQILPDPSKPSKRSFIEDLLFNKVTLADAGFIKQYGDCLGDIAARDLICAQKFNGLTVLPPLLTDEMIAQYTSALLAGTITSGWTFGAGPALQIPFAMQMAYRFNGIGVTQNVLYENQKLIANQFNSAIGKIQDSLSSTASALGKLQDVVNQNAQALNTLVKQLSSNFGAISSVLNDILSRLDPPEAEVQIDRLITGRLQSLQTYVTQQLIRAAEIRASANLAATKMSECVLGQSKRVDFCGKGYHLMSFPQSAPHGVVFLHVTYVPAQEKNFTTAPAICHDGKAHFPREGVFVSNGTHWFVTQRNFYEPQIITTDNTFVSGNCDVVIGIVNNTVYDPLQPELDSFKEELDKYFKNHTSPDVDLGDISGINASVVNIQKEIDRLNEVAKNLNESLIDLQELGKYEQYIKWPWYIWLGFIAGLIAIVMVTIMLCCMTSCCSCLKGCCSCGSCCKFDEDDSEPVLKGVKLHYT

SEQ ID NO: 396 - protein, 1273 aa, Artificial Sequence
  source: /note="Description of Artificial Sequence: Synthetic polypeptide"
MFVFLVLLPLVSSQCVNLTTRTQLPPAYTNSFTRGVYYPDKVFRSSVLHSTQDLFLPFFSNVTWFHAIHVSGTNGTKRFDNPVLPFNDGVYFASTEKSNIIRGWIFGTTLDSKTQSLLIVNNATNVVIKVCEFQFCNDPFLGVYYHKNNKSWMESEFRVYSSANNCTFEYVSQPFLMDLEGKQGNFKNLREFVFKNIDGYFKIYSKHTPINLVRDLPQGFSALEPLVDLPIGINITRFQTLLALHRSYLTPGDSSSGWTAGAAAYYVGYLQPRTFLLKYNENGTITDAVDCALDPLSETKCTLKSFTVEKGIYQTSNFRVQPTESIVRFPNITNLCPFGEVFNATRFASVYAWNRKRISNCVADYSVLYNSASFSTFKCYGVSPTKLNDLCFTNVYADSFVIRGDEVRQIAPGQTGKIADYNYKLPDDFTGCVIAWNSNNLDSKVGGNYNYLYRLFRKSNLKPFERDISTEIYQAGSTPCNGVEGFNCYFPLQSYGFQPTNGVGYQPYRVVVLSFELLHAPATVCGPKKSTNLVKNKCVNFNFNGLTGTGVLTESNKKFLPFQQFGRDIADITDAVRDPQTLEILDITPCSFGGVSVITPGTNTSNQVAVLYQNVNCTEVPVAIHADQLTPTWRVYSTGSNVFQTRAGCLIGAEHVNNSYECDIPIGAGICASYQTQTNSPRRARSVASQSIIAYTMSLGAENSVAYSNNSIAIPTNFTISVTTEILPVSMTKTSVDCTMYICGDSTECSNLLLQYGSFCTQLNRALTGIAVEQDKNTQEVFAQVKQIYKTPPIKDFGGFNFSQILPDPSKPSKRSFIEDLLFNKVTLADAGFIKQYGDCLGDIAARDLICAQKFNGLTVLPPLLTDEMIAQYTSALLACTITSGWTCGAGPALQIPFAMQMAYRFNGIGVTQNVLYENQKLIANQFNSAIGKIQDSLSSTASALGKLQDVVNQNAQALNTLVKQLSSNFGAISSVLNDILSRLDPPEAEVQIDRLITGRLQSLQTYVTQQLIRAAEIRASANLAATKMSECVLGQSKRVDFCGKGYHLMSFPQSAPHGVVFLHVTYVPAQEKNFTTAPAICHDGKAHFPREGVFVSNGTHWFVTQRNFYEPQIITTDNTFVSGNCDVVIGIVNNTVYDPLQPELDSFKEELDKYFKNHTSPDVDLGDISGINASVVNIQKEIDRLNEVAKNLNESLIDLQELGKYEQYIKWPWYIWLGFIAGLIAIVMVTIMLCCMTSCCSCLKGCCSCGSCCKFDEDDSEPVLKGVKLHYT

SEQ ID NO: 397 - protein, 1273 aa, Artificial Sequence
  source: /note="Description of Artificial Sequence: Synthetic polypeptide"
MFVFLVLLPLVSSQCVNLTTRTQLPPAYTNSFTRGVYYPDKVFRSSVLHSTQDLFLPFFSNVTWFHAIHVSGTNGTKRFDNPVLPFNDGVYFASTEKSNIIRGWIFGTTLDSKTQSLLIVNNATNVVIKVCEFQFCNDPFLGVYYHKNNKSWMESEFRVYSSANNCTFEYVSQPFLMDLEGKQGNFKNLREFVFKNIDGYFKIYSKHTPINLVRDLPQGFSALEPLVDLPIGINITRFQTLLALHRSYLTPGDSSSGWTAGAAAYYVGYLQPRTFLLKYNENGTITDAVDCALDPLSETKCTLKSFTVEKGIYQTSNFRVQPTESIVRFPNITNLCPFGEVFNATRFASVYAWNRKRISNCVADYSVLYNSASFSTFKCYGVSPTKLNDLCFTNVYADSFVIRGDEVRQIAPGQTGKIADYNYKLPDDFTGCVIAWNSNNLDSKVGGNYNYLYRLFRKSNLKPFERDISTEIYQAGSTPCNGVEGFNCYFPLQSYGFQPTNGVGYQPYRVVVLSFELLHAPATVCGPKKSTNLVKNKCVNFNFNGLTGTGVLTESNKKFLPFQQFGRDIADITDAVRDPQTLEILDITPCSFGGVSVITPGTNTSNQVAVLYQNVNCTEVPVAIHADQLTPTWRVYSTGSNVFQTRAGCLIGAEHVNNSYECDIPIGAGICASYQTQTNSPRRARSVASQSIIAYTMSLGAENSVAYSNNSIAIPTNFTISVTTEILPVSMTKTSVDCTMYICGDSTECSNLLLQYGSFCTQLNRALTGIAVEQDKNTQEVFAQVKQIYKTPPIKDFGGFNFSQILPDPSKPSKRSFIEDLLFNKVTLADAGFIKQYGDCLGDIAARDLICAQKFNGLTVLPPLLTDEMIAQYTSALLAGTITCGWTFGAGPCLQIPFAMQMAYRFNGIGVTQNVLYENQKLIANQFNSAIGKIQDSLSSTASALGKLQDVVNQNAQALNTLVKQLSSNFGAISSVLNDILSRLDPPEAEVQIDRLITGRLQSLQTYVTQQLIRAAEIRASANLAATKMSECVLGQSKRVDFCGKGYHLMSFPQSAPHGVVFLHVTYVPAQEKNFTTAPAICHDGKAHFPREGVFVSNGTHWFVTQRNFYEPQIITTDNTFVSGNCDVVIGIVNNTVYDPLQPELDSFKEELDKYFKNHTSPDVDLGDISGINASVVNIQKEIDRLNEVAKNLNESLIDLQELGKYEQYIKWPWYIWLGFIAGLIAIVMVTIMLCCMTSCCSCLKGCCSCGSCCKFDEDDSEPVLKGVKLHYT

SEQ ID NO: 398 - protein, 1273 aa, Artificial Sequence
  source: /note="Description of Artificial Sequence: Synthetic polypeptide"
MFVFLVLLPLVSSQCVNLTTRTQLPPAYTNSFTRGVYYPDKVFRSSVLHSTQDLFLPFFSNVTWFHAIHVSGTNGTKRFDNPVLPFNDGVYFASTEKSNIIRGWIFGTTLDSKTQSLLIVNNATNVVIKVCEFQFCNDPFLGVYYHKNNKSWMESEFRVYSSANNCTFEYVSQPFLMDLEGKQGNFKNLREFVFKNIDGYFKIYSKHTPINLVRDLPQGFSALEPLVDLPIGINITRFQTLLALHRSYLTPGDSSSGWTAGAAAYYVGYLQPRTFLLKYNENGTITDAVDCALDPLSETKCTLKSFTVEKGIYQTSNFRVQPTESIVRFPNITNLCPFGEVFNATRFASVYAWNRKRISNCVADYSVLYNSASFSTFKCYGVSPTKLNDLCFTNVYADSFVIRGDEVRQIAPGQTGKIADYNYKLPDDFTGCVIAWNSNNLDSKVGGNYNYLYRLFRKSNLKPFERDISTEIYQAGSTPCNGVEGFNCYFPLQSYGFQPTNGVGYQPYRVVVLSFELLHAPATVCGPKKSTPLVKNKCVNFNFNGLTGTGVLTESNKKFLPFQQFGRDIADTTDAVRDPQTLEILDITPCSFGGVSVITPGTNTSNQVAVLYQNVNCTEVPVAIHADQLTPTWRVYSTGSNVFQTRAGCLIGAEHVNNSYECDIPIGAGICASYQTQTNSPRRARSVASQSIIAYTMSLGAENSVAYSNNSIAIPTNFTISVTTEILPVSMTKTSVDCTMYICGDSTECSNLLLQYGSFCTQLNRALTGIAVEQDKNTQEVFAQVKQIYKTPPIKDFGGFNFSQILPDPSKPSKRSFIEDLLFNKVTLADAGFIKQYGDCLGDIAARDLICAQKFNGLTVLPPLLTDEMIAQYTSALLACTITSGWTCGAGPALQIPFAMQMAYRFNGIGVTQNVLYENQKLIANQFNSAIGKIQDSLSSTASALGKLQDVVNQNAQALNTLVKQLSSNFGAISSVLNDILSRLDPPEAEVQIDRLITGRLQSLQTYVTQQLIRAAEIRASANLAATKMSECVLGQSKRVDFCGKGYHLMSFPQSAPHGVVFLHVTYVPAQEKNFTTAPAICHDGKAHFPREGVFVSNGTHWFVTQRNFYEPQIITTDNTFVSGNCDVVIGIVNNTVYDPLQPELDSFKEELDKYFKNHTSPDVDLGDISGINASVVNIQKEIDRLNEVAKNLNESLIDLQELGKYEQYIKWPWYIWLGFIAGLIAIVMVTIMLCCMTSCCSCLKGCCSCGSCCKFDEDDSEPVLKGVKLHYT

SEQ ID NO: 399 - protein, 1273 aa, Artificial Sequence
  source: /note="Description of Artificial Sequence: Synthetic polypeptide"
MFVFLVLLPLVSSQCVNLTTRTQLPPAYTNSFTRGVYYPDKVFRSSVLHSTQDLFLPFFSNVTWFHAIHVSGTNGTKRFDNPVLPFNDGVYFASTEKSNIIRGWIFGTTLDSKTQSLLIVNNATNVVIKVCEFQFCNDPFLGVYYHKNNKSWMESEFRVYSSANNCTFEYVSQPFLMDLEGKQGNFKNLREFVFKNIDGYFKIYSKHTPINLVRDLPQGFSALEPLVDLPIGINITRFQTLLALHRSYLTPGDSSSGWTAGAAAYYVGYLQPRTFLLKYNENGTITDAVDCALDPLSETKCTLKSFTVEKGIYQTSNFRVQPTESIVRFPNITNLCPFGEVFNATRFASVYAWNRKRISNCVADYSVLYNSASFSTFKCYGVSPTKLNDLCFTNVYADSFVIRGDEVRQIAPGQTGKIADYNYKLPDDFTGCVIAWNSNNLDSKVGGNYNYLYRLFRKSNLKPFERDISTEIYQAGSTPCNGVEGFNCYFPLQSYGFQPTNGVGYQPYRVVVLSFELLHAPATVCGPKKSTPLVKNKCVNFNFNGLTGTGVLTESNKKFLPFQQFGRDIADTTDAVRDPQTLEILDITPCSFGGVSVITPGTNTSNQVAVLYQNVNCTEVPVAIHADQLTPTWRVYSTGSNVFQTRAGCLIGAEHVNNSYECDIPIGAGICASYQTQTNSPRRARSVASQSIIAYTMSLGAENSVAYSNNSIAIPTNFTISVTTEILPVSMTKTSVDCTMYICGDSTECSNLLLQYGSFCTQLNRALTGIAVEQDKNTQEVFAQVKQIYKTPPIKDFGGFNFSQILPDPSKPSKRSFIEDLLFNKVTLADAGFIKQYGDCLGDIAARDLICAQKFNGLTVLPPLLTDEMIAQYTSALLAGTITCGWTFGAGPCLQIPFAMQMAYRFNGIGVTQNVLYENQKLIANQFNSAIGKIQDSLSSTASALGKLQDVVNQNAQALNTLVKQLSSNFGAISSVLNDILSRLDPPEAEVQIDRLITGRLQSLQTYVTQQLIRAAEIRASANLAATKMSECVLGQSKRVDFCGKGYHLMSFPQSAPHGVVFLHVTYVPAQEKNFTTAPAICHDGKAHFPREGVFVSNGTHWFVTQRNFYEPQIITTDNTFVSGNCDVVIGIVNNTVYDPLQPELDSFKEELDKYFKNHTSPDVDLGDISGINASVVNIQKEIDRLNEVAKNLNESLIDLQELGKYEQYIKWPWYIWLGFIAGLIAIVMVTIMLCCMTSCCSCLKGCCSCGSCCKFDEDDSEPVLKGVKLHYT

SEQ ID NO: 400 - protein, 1273 aa, Artificial Sequence
  source: /note="Description of Artificial Sequence: Synthetic polypeptide"
MFVFLVLLPLVSSQCVNLTTRTQLPPAYTNSFTRGVYYPDKVFRSSVLHSTQDLFLPFFSNVTWFHAIHVSGTNGTKRFDNPVLPFNDGVYFASTEKSNIIRGWIFGTTLDSKTQSLLIVNNATNVVIKVCEFQFCNDPFLGVYYHKNNKSWMESEFRVYSSANNCTFEYVSQPFLMDLEGKQGNFKNLREFVFKNIDGYFKIYSKHTPINLVRDLPQGFSALEPLVDLPIGINITRFQTLLALHRSYLTPGDSSSGWTAGAAAYYVGYLQPRTFLLKYNENGTITDAVDCALDPLSETKCTLKSFTVEKGIYQTSNFRVQPTESIVRFPNITNLCPFGEVFNATRFASVYAWNRKRISNCVADYSVLYNSASFSTFKCYGVSPTKLNDLCFTNVYADSFVIRGDEVRQIAPGQTGKIADYNYKLPDDFTGCVIAWNSNNLDSKVGGNYNYLYRLFRKSNLKPFERDISTEIYQAGSTPCNGVEGFNCYFPLQSYGFQPTNGVGYQPYRVVVLSFELLHAPATVCGPKKSTPLVKNKCVNFNFNGLTGTGVLTESNKKFLPFQQFGRDIADITDAVRDPQTLEILDITPCSFGGVSVITPGTNTSNQVAVLYQDVNCTEVPVAIHADQLTPTWRVYSTGSNVFQTRAGCLIGAEHVNNSYECDIPIGAGICASYQTQTNSPRRARSVASQSIIAYTMSLGAENSVAYSNNSIAIPTNFTISVTTEILPVSMTKTSVDCTMYICGDSTECSNLLLQYGSFCTQLNRALTGIAVEQDKNTQEVFAQVKQIYKTPPIKDFGGFNFSQILPDPSKPSKRSFIEDLLFNKVTLADAGFIKQYGDCLGDIAARDLICAQKFNGLTVLPPLLTDEMIAQYTSALLACTITSGWTCGAGPALQIPFAMQMAYRFNGIGVTQNVLYENQKLIANQFNSAIGKIQDSLSSTASALGKLQDVVNQNAQALNTLVKQLSSNFGAISSVLNDILSRLDPPEAEVQIDRLITGRLQSLQTYVTQQLIRAAEIRASANLAATKMSECVLGQSKRVDFCGKGYHLMSFPQSAPHGVVFLHVTYVPAQEKNFTTAPAICHDGKAHFPREGVFVSNGTHWFVTQRNFYEPQIITTDNTFVSGNCDVVIGIVNNTVYDPLQPELDSFKEELDKYFKNHTSPDVDLGDISGINASVVNIQKEIDRLNEVAKNLNESLIDLQELGKYEQYIKWPWYIWLGFIAGLIAIVMVTIMLCCMTSCCSCLKGCCSCGSCCKFDEDDSEPVLKGVKLHYT

SEQ ID NO: 401 - protein, 1273 aa, Artificial Sequence
  source: /note="Description of Artificial Sequence: Synthetic polypeptide"
MFVFLVLLPLVSSQCVNLTTRTQLPPAYTNSFTRGVYYPDKVFRSSVLHSTQDLFLPFFSNVTWFHAIHVSGTNGTKRFDNPVLPFNDGVYFASTEKSNIIRGWIFGTTLDSKTQSLLIVNNATNVVIKVCEFQFCNDPFLGVYYHKNNKSWMESEFRVYSSANNCTFEYVSQPFLMDLEGKQGNFKNLREFVFKNIDGYFKIYSKHTPINLVRDLPQGFSALEPLVDLPIGINITRFQTLLALHRSYLTPGDSSSGWTAGAAAYYVGYLQPRTFLLKYNENGTITDAVDCALDPLSETKCTLKSFTVEKGIYQTSNFRVQPTESIVRFPNITNLCPFGEVFNATRFASVYAWNRKRISNCVADYSVLYNSASFSTFKCYGVSPTKLNDLCFTNVYADSFVIRGDEVRQIAPGQTGKIADYNYKLPDDFTGCVIAWNSNNLDSKVGGNYNYLYRLFRKSNLKPFERDISTEIYQAGSTPCNGVEGFNCYFPLQSYGFQPTNGVGYQPYRVVVLSFELLHAPATVCGPKKSTPLVKNKCVNFNFNGLTGTGVLTESNKKFLPFQQFGRDIADITDAVRDPQTLEILDITPCSFGGVSVITPGTNTSNQVAVLYQDVNCTEVPVAIHADQLTPTWRVYSTGSNVFQTRAGCLIGAEHVNNSYECDIPIGAGICASYQTQTNSPRRARSVASQSIIAYTMSLGAENSVAYSNNSIAIPTNFTISVTTEILPVSMTKTSVDCTMYICGDSTECSNLLLQYGSFCTQLNRALTGIAVEQDKNTQEVFAQVKQIYKTPPIKDFGGFNFSQILPDPSKPSKRSFIEDLLFNKVTLADAGFIKQYGDCLGDIAARDLICAQKFNGLTVLPPLLTDEMIAQYTSALLAGTITCGWTFGAGPCLQIPFAMQMAYRFNGIGVTQNVLYENQKLIANQFNSAIGKIQDSLSSTASALGKLQDVVNQNAQALNTLVKQLSSNFGAISSVLNDILSRLDPPEAEVQIDRLITGRLQSLQTYVTQQLIRAAEIRASANLAATKMSECVLGQSKRVDFCGKGYHLMSFPQSAPHGVVFLHVTYVPAQEKNFTTAPAICHDGKAHFPREGVFVSNGTHWFVTQRNFYEPQIITTDNTFVSGNCDVVIGIVNNTVYDPLQPELDSFKEELDKYFKNHTSPDVDLGDISGINASVVNIQKEIDRLNEVAKNLNESLIDLQELGKYEQYIKWPWYIWLGFIAGLIAIVMVTIMLCCMTSCCSCLKGCCSCGSCCKFDEDDSEPVLKGVKLHYT

SEQ ID NO: 402 - protein, 1273 aa, Artificial Sequence
  source: /note="Description of Artificial Sequence: Synthetic polypeptide"
MFVFLVLLPLVSSQCVNLTTRTQLPPAYTNSFTRGVYYPDKVFRSSVLHSTQDLFLPFFSNVTWFHAIHVSGTNGTKRFDNPVLPFNDGVYFASTEKSNIIRGWIFGTTLDSKTQSLLIVNNATNVVIKVCEFQFCNDPFLGVYYHKNNKSWMESEFRVYSSANNCTFEYVSQPFLMDLEGKQGNFKNLREFVFKNIDGYFKIYSKHTPINLVRDLPQGFSALEPLVDLPIGINITRFQTLLALHRSYLTPGDSSSGWTAGAAAYYVGYLQPRTFLLKYNENGTITDAVDCALDPLSETKCTLKSFTVEKGIYQTSNFRVQPTESIVRFPNITNLCPFGEVFNATRFASVYAWNRKRISNCVADYSVLYNSASFSTFKCYGVSPTKLNDLCFTNVYADSFVIRGDEVRQIAPGQTGKIADYNYKLPDDFTGCVIAWNSNNLDSKVGGNYNYLYRLFRKSNLKPFERDISTEIYQAGSTPCNGVEGFNCYFPLQSYGFQPTNGVGYQPYRVVVLSFELLHAPATVCGPKKSTPLVKNKCVNFNFNGLTGTGVLTESNKKFLPFQQFGRDIADITDAVRDPQTLEILDITPCSFGGVSVITPGTNTSNQVAVLYQNVNCTEVPVAIHADQLTPTWRVYSTGSNVFQTRAGCLIGAEHVNNSYECDIPIGAGICASYQTQTNSPRRARSVASQSIIAYTMSLGAENSVAYSNNSIAIPTNFTISVTTEILPVSMTKTSVDCTMYICGDSTECSNLLLQYGSFCTQLNRALTGIAVEQDKNTQEVFAQVKQIYKTPPIKDFGGFNFSQILPDPSKPSKRSFIEDLLFNKVTLADAGFIKQYGDCLGDIAARDLICAQKFNGLTVLPPLLTDEMIAQYTSALLACTITSGWTCGAGAALQIPFAMQMAYRFNGIGVTQNVLYENQKLIANQFNSAIGKIQDSLSSTASALGKLQDVVNQNAQALNTLVKQLSSNFGAISSVLNDILSRLDPPEAEVQIDRLITGRLQSLQTYVTQQLIRAAEIRASANLAATKMSECVLGQSKRVDFCGKGYHLMSFPQSAPHGVVFLHVTYVPAQEKNFTTAPAICHDGKAHFPREGVFVSNGTHWFVTQRNFYEPQIITTDNTFVSGNCDVVIGIVNNTVYDPLQPELDSFKEELDKYFKNHTSPDVDLGDISGINASVVNIQKEIDRLNEVAKNLNESLIDLQELGKYEQYIKWPWYIWLGFIAGLIAIVMVTIMLCCMTSCCSCLKGCCSCGSCCKFDEDDSEPVLKGVKLHYT

SEQ ID NO: 403 - protein, 1273 aa, Artificial Sequence
  source: /note="Description of Artificial Sequence: Synthetic polypeptide"
MFVFLVLLPLVSSQCVNLTTRTQLPPAYTNSFTRGVYYPDKVFRSSVLHSTQDLFLPFFSNVTWFHAIHVSGTNGTKRFDNPVLPFNDGVYFASTEKSNIIRGWIFGTTLDSKTQSLLIVNNATNVVIKVCEFQFCNDPFLGVYYHKNNKSWMESEFRVYSSANNCTFEYVSQPFLMDLEGKQGNFKNLREFVFKNIDGYFKIYSKHTPINLVRDLPQGFSALEPLVDLPIGINITRFQTLLALHRSYLTPGDSSSGWTAGAAAYYVGYLQPRTFLLKYNENGTITDAVDCALDPLSETKCTLKSFTVEKGIYQTSNFRVQPTESIVRFPNITNLCPFGEVFNATRFASVYAWNRKRISNCVADYSVLYNSASFSTFKCYGVSPTKLNDLCFTNVYADSFVIRGDEVRQIAPGQTGKIADYNYKLPDDFTGCVIAWNSNNLDSKVGGNYNYLYRLFRKSNLKPFERDISTEIYQAGSTPCNGVEGFNCYFPLQSYGFQPTNGVGYQPYRVVVLSFELLHAPATVCGPKKSTPLVKNKCVNFNFNGLTGTGVLTESNKKFLPFQQFGRDIADITDAVRDPQTLEILDITPCSFGGVSVITPGTNTSNQVAVLYQNVNCTEVPVAIHADQLTPTWRVYSTGSNVFQTRAGCLIGAEHVNNSYECDIPIGAGICASYQTQTNSPRRARSVASQSIIAYTMSLGAENSVAYSNNSIAIPTNFTISVTTEILPVSMTKTSVDCTMYICGDSTECSNLLLQYGSFCTQLNRALTGIAVEQDKNTQEVFAQVKQIYKTPPIKDFGGFNFSQILPDPSKPSKRSFIEDLLFNKVTLADAGFIKQYGDCLGDIAARDLICAQKFNGLTVLPPLLTDEMIAQYTSALLAGTITCGWTFGAGACLQIPFAMQMAYRFNGIGVTQNVLYENQKLIANQFNSAIGKIQDSLSSTASALGKLQDVVNQNAQALNTLVKQLSSNFGAISSVLNDILSRLDPPEAEVQIDRLITGRLQSLQTYVTQQLIRAAEIRASANLAATKMSECVLGQSKRVDFCGKGYHLMSFPQSAPHGVVFLHVTYVPAQEKNFTTAPAICHDGKAHFPREGVFVSNGTHWFVTQRNFYEPQIITTDNTFVSGNCDVVIGIVNNTVYDPLQPELDSFKEELDKYFKNHTSPDVDLGDISGINASVVNIQKEIDRLNEVAKNLNESLIDLQELGKYEQYIKWPWYIWLGFIAGLIAIVMVTIMLCCMTSCCSCLKGCCSCGSCCKFDEDDSEPVLKGVKLHYT

SEQ ID NO: 404 - protein, 1273 aa, Artificial Sequence
  source: /note="Description of Artificial Sequence: Synthetic polypeptide"
MFVFLVLLPLVSSQCVNLTTRTQLPPAYTNSFTRGVYYPDKVFRSSVLHSTQDLFLPFFSNVTWFHAIHVSGTNGTKRFDNPVLPFNDGVYFASTEKSNIIRGWIFGTTLDSKTQSLLIVNNATNVVIKVCEFQFCNDPFLGVYYHKNNKSWMESEFRVYSSANNCTFEYVSQPFLMDLEGKQGNFKNLREFVFKNIDGYFKIYSKHTPINLVRDLPQGFSALEPLVDLPIGINITRFQTLLALHRSYLTPGDSSSGWTAGAAAYYVGYLQPRTFLLKYNENGTITDAVDCALDPLSETKCTLKSFTVEKGIYQTSNFRVQPTESIVRFPNITNLCPFGEVFNATRFASVYAWNRKRISNCVADYSVLYNSASFSTFKCYGVSPTKLNDLCFTNVYADSFVIRGDEVRQIAPGQTGKIADYNYKLPDDFTGCVIAWNSNNLDSKVGGNYNYLYRLFRKSNLKPFERDISTEIYQAGSTPCNGVEGFNCYFPLQSYGFQPTNGVGYQPYRVVVLSFELLHAPATVCGPKKSTPLVKNKCVNFNFNGLTGTGVLTESNKKFLPFQQFGRDIADITDAVRDPQTLEILDITPCSFGGVSVITPGTNTSNQVAVLYQNVNCTEVPVAIHADQLTPTWRVYSTGSNVFQTRAGCLIGAEHVNNSYECDIPIGAGICASYQTQTNSPRRARSVASQSIIAYTMSLGAENSVAYSNNSIAIPTNFTISVTTEILPVSMTKTSVDCTMYICGDSTECSNLLLQYGSFCTQLNRALTGIAVEQDKNTQEVFAQVKQIYKTPPIKDFGGFNFSQILPDPSKPSKRSFIEDLLFNKVTLADAGFIKQYGDCLGDIAARDLICAQKFNGLTVLPPLLTDEMIAQYTSALLAGTITSGWTFGAGPALQIPFAMQMAYRFNGIGVTQNVLYENQKLIANQFNSAIGKIQDSLSSTPSALGKLQDVVNQNAQALNTLVKQLSSNFGAISSVLNDILSRLDPPEAEVQIDRLITGRLQSLQTYVTQQLIRAAEIRASANLAATKMSECVLGQSKRVDFCGKGYHLMSFPQSAPHGVVFLHVTYVPAQEKNFTTAPAICHDGKAHFPREGVFVSNGTHWFVTQRNFYEPQIITTDNTFVSGNCDVVIGIVNNTVYDPLQPELDSFKEELDKYFKNHTSPDVDLGDISGINASVVNIQKEIDRLNEVAKNLNESLIDLQELGKYEQYIKWPWYIWLGFIAGLIAIVMVTIMLCCMTSCCSCLKGCCSCGSCCKFDEDDSEPVLKGVKLHYT

SEQ ID NO: 405 - protein, 1273 aa, Artificial Sequence
  source: /note="Description of Artificial Sequence: Synthetic polypeptide"
MFVFLVLLPLVSSQCVNLTTRTQLPPAYTNSFTRGVYYPDKVFRSSVLHSTQDLFLPFFSNVTWFHAIHVSGTNGTKRFDNPVLPFNDGVYFASTEKSNIIRGWIFGTTLDSKTQSLLIVNNATNVVIKVCEFQFCNDPFLGVYYHKNNKSWMESEFRVYSSANNCTFEYVSQPFLMDLEGKQGNFKNLREFVFKNIDGYFKIYSKHTPINLVRDLPQGFSALEPLVDLPIGINITRFQTLLALHRSYLTPGDSSSGWTAGAAAYYVGYLQPRTFLLKYNENGTITDAVDCALDPLSETKCTLKSFTVEKGIYQTSNFRVQPTESIVRFPNITNLCPFGEVFNATRFASVYAWNRKRISNCVADYSVLYNSASFSTFKCYGVSPTKLNDLCFTNVYADSFVIRGDEVRQIAPGQTGKIADYNYKLPDDFTGCVIAWNSNNLDSKVGGNYNYLYRLFRKSNLKPFERDISTEIYQAGSTPCNGVEGFNCYFPLQSYGFQPTNGVGYQPYRVVVLSFELLHAPATVCGPKKSTNLVKNKCVNFNFNGLTGTGVLTESNKKFLPFQQFGRDIADITDAVRDPQTLEILDITPCSFGGVSVITPGTNTSNQVAVLYQNVNCTEVPVAIHADQLTPTWRVYSTGSNVFQTRAGCLIGAEHVNNSYECDIPIGAGICASYQTQTNSPRRARSVASQSIIAYTMSLGAENSVAYSNNSIAIPTNFTISVTTEILPVSMTKTSVDCTMYICGDSTECSNLLLQYGSFCTQLNRALTGIAVEQDKNTQEVFAQVKQIYKTPPIKDFGGFNFSQILPDPSKPSKRSFIEDLLFNKVTLADAGFIKQYGDCLGDIAARDLICAQKFNGLTVLPPLLTDEMIAQYTSALLACTITSGWTCGAGPALQIPFAMQMAYRFNGIGVTQNVLYENQKLIANQFNSAIGKIQDSLSSTPSALGKLQDVVNQNAQALNTLVKQLSSNFGAISSVLNDILSRLDPPEAEVQIDRLITGRLQSLQTYVTQQLIRAAEIRASANLAATKMSECVLGQSKRVDFCGKGYHLMSFPQSAPHGVVFLHVTYVPAQEKNFTTAPAICHDGKAHFPREGVFVSNGTHWFVTQRNFYEPQIITTDNTFVSGNCDVVIGIVNNTVYDPLQPELDSFKEELDKYFKNHTSPDVDLGDISGINASVVNIQKEIDRLNEVAKNLNESLIDLQELGKYEQYIKWPWYIWLGFIAGLIAIVMVTIMLCCMTSCCSCLKGCCSCGSCCKFDEDDSEPVLKGVKLHYT

SEQ ID NO: 406 - protein, 1273 aa, Artificial Sequence
  source: /note="Description of Artificial Sequence: Synthetic polypeptide"
MFVFLVLLPLVSSQCVNLTTRTQLPPAYTNSFTRGVYYPDKVFRSSVLHSTQDLFLPFFSNVTWFHAIHVSGTNGTKRFDNPVLPFNDGVYFASTEKSNIIRGWIFGTTLDSKTQSLLIVNNATNVVIKVCEFQFCNDPFLGVYYHKNNKSWMESEFRVYSSANNCTFEYVSQPFLMDLEGKQGNFKNLREFVFKNIDGYFKIYSKHTPINLVRDLPQGFSALEPLVDLPIGINITRFQTLLALHRSYLTPGDSSSGWTAGAAAYYVGYLQPRTFLLKYNENGTITDAVDCALDPLSETKCTLKSFTVEKGIYQTSNFRVQPTESIVRFPNITNLCPFGEVFNATRFASVYAWNRKRISNCVADYSVLYNSASFSTFKCYGVSPTKLNDLCFTNVYADSFVIRGDEVRQIAPGQTGKIADYNYKLPDDFTGCVIAWNSNNLDSKVGGNYNYLYRLFRKSNLKPFERDISTEIYQAGSTPCNGVEGFNCYFPLQSYGFQPTNGVGYQPYRVVVLSFELLHAPATVCGPKKSTNLVKNKCVNFNFNGLTGTGVLTESNKKFLPFQQFGRDIADITDAVRDPQTLEILDITPCSFGGVSVITPGTNTSNQVAVLYQNVNCTEVPVAIHADQLTPTWRVYSTGSNVFQTRAGCLIGAEHVNNSYECDIPIGAGICASYQTQTNSPRRARSVASQSIIAYTMSLGAENSVAYSNNSIAIPTNFTISVTTEILPVSMTKTSVDCTMYICGDSTECSNLLLQYGSFCTQLNRALTGIAVEQDKNTQEVFAQVKQIYKTPPIKDFGGFNFSQILPDPSKPSKRSFIEDLLFNKVTLADAGFIKQYGDCLGDIAARDLICAQKFNGLTVLPPLLTDEMIAQYTSALLAGTITCGWTFGAGPCLQIPFAMQMAYRFNGIGVTQNVLYENQKLIANQFNSAIGKIQDSLSSTPSALGKLQDVVNQNAQALNTLVKQLSSNFGAISSVLNDILSRLDPPEAEVQIDRLITGRLQSLQTYVTQQLIRAAEIRASANLAATKMSECVLGQSKRVDFCGKGYHLMSFPQSAPHGVVFLHVTYVPAQEKNFTTAPAICHDGKAHFPREGVFVSNGTHWFVTQRNFYEPQIITTDNTFVSGNCDVVIGIVNNTVYDPLQPELDSFKEELDKYFKNHTSPDVDLGDISGINASVVNIQKEIDRLNEVAKNLNESLIDLQELGKYEQYIKWPWYIWLGFIAGLIAIVMVTIMLCCMTSCCSCLKGCCSCGSCCKFDEDDSEPVLKGVKLHYT

SEQ ID NO: 407 - protein, 1273 aa, Artificial Sequence
  source: /note="Description of Artificial Sequence: Synthetic polypeptide"
MFVFLVLLPLVSSQCVNLTTRTQLPPAYTNSFTRGVYYPDKVFRSSVLHSTQDLFLPFFSNVTWFHAIHVSGTNGTKRFDNPVLPFNDGVYFASTEKSNIIRGWIFGTTLDSKTQSLLIVNNATNVVIKVCEFQFCNDPFLGVYYHKNNKSWMESEFRVYSSANNCTFEYVSQPFLMDLEGKQGNFKNLREFVFKNIDGYFKIYSKHTPINLVRDLPQGFSALEPLVDLPIGINITRFQTLLALHRSYLTPGDSSSGWTAGAAAYYVGYLQPRTFLLKYNENGTITDAVDCALDPLSETKCTLKSFTVEKGIYQTSNFRVQPTESIVRFPNITNLCPFGEVFNATRFASVYAWNRKRISNCVADYSVLYNSASFSTFKCYGVSPTKLNDLCFTNVYADSFVIRGDEVRQIAPGQTGKIADYNYKLPDDFTGCVIAWNSNNLDSKVGGNYNYLYRLFRKSNLKPFERDISTEIYQAGSTPCNGVEGFNCYFPLQSYGFQPTNGVGYQPYRVVVLSFELLHAPATVCGPKKSTPLVKNKCVNFNFNGLTGTGVLTESNKKFLPFQQFGRDIADTTDAVRDPQTLEILDITPCSFGGVSVITPGTNTSNQVAVLYQNVNCTEVPVAIHADQLTPTWRVYSTGSNVFQTRAGCLIGAEHVNNSYECDIPIGAGICASYQTQTNSPRRARSVASQSIIAYTMSLGAENSVAYSNNSIAIPTNFTISVTTEILPVSMTKTSVDCTMYICGDSTECSNLLLQYGSFCTQLNRALTGIAVEQDKNTQEVFAQVKQIYKTPPIKDFGGFNFSQILPDPSKPSKRSFIEDLLFNKVTLADAGFIKQYGDCLGDIAARDLICAQKFNGLTVLPPLLTDEMIAQYTSALLACTITSGWTCGAGPALQIPFAMQMAYRFNGIGVTQNVLYENQKLIANQFNSAIGKIQDSLSSTPSALGKLQDVVNQNAQALNTLVKQLSSNFGAISSVLNDILSRLDPPEAEVQIDRLITGRLQSLQTYVTQQLIRAAEIRASANLAATKMSECVLGQSKRVDFCGKGYHLMSFPQSAPHGVVFLHVTYVPAQEKNFTTAPAICHDGKAHFPREGVFVSNGTHWFVTQRNFYEPQIITTDNTFVSGNCDVVIGIVNNTVYDPLQPELDSFKEELDKYFKNHTSPDVDLGDISGINASVVNIQKEIDRLNEVAKNLNESLIDLQELGKYEQYIKWPWYIWLGFIAGLIAIVMVTIMLCCMTSCCSCLKGCCSCGSCCKFDEDDSEPVLKGVKLHYT

SEQ ID NO: 408 - protein, 1273 aa, Artificial Sequence
  source: /note="Description of Artificial Sequence: Synthetic polypeptide"
MFVFLVLLPLVSSQCVNLTTRTQLPPAYTNSFTRGVYYPDKVFRSSVLHSTQDLFLPFFSNVTWFHAIHVSGTNGTKRFDNPVLPFNDGVYFASTEKSNIIRGWIFGTTLDSKTQSLLIVNNATNVVIKVCEFQFCNDPFLGVYYHKNNKSWMESEFRVYSSANNCTFEYVSQPFLMDLEGKQGNFKNLREFVFKNIDGYFKIYSKHTPINLVRDLPQGFSALEPLVDLPIGINITRFQTLLALHRSYLTPGDSSSGWTAGAAAYYVGYLQPRTFLLKYNENGTITDAVDCALDPLSETKCTLKSFTVEKGIYQTSNFRVQPTESIVRFPNITNLCPFGEVFNATRFASVYAWNRKRISNCVADYSVLYNSASFSTFKCYGVSPTKLNDLCFTNVYADSFVIRGDEVRQIAPGQTGKIADYNYKLPDDFTGCVIAWNSNNLDSKVGGNYNYLYRLFRKSNLKPFERDISTEIYQAGSTPCNGVEGFNCYFPLQSYGFQPTNGVGYQPYRVVVLSFELLHAPATVCGPKKSTPLVKNKCVNFNFNGLTGTGVLTESNKKFLPFQQFGRDIADTTDAVRDPQTLEILDITPCSFGGVSVITPGTNTSNQVAVLYQNVNCTEVPVAIHADQLTPTWRVYSTGSNVFQTRAGCLIGAEHVNNSYECDIPIGAGICASYQTQTNSPRRARSVASQSIIAYTMSLGAENSVAYSNNSIAIPTNFTISVTTEILPVSMTKTSVDCTMYICGDSTECSNLLLQYGSFCTQLNRALTGIAVEQDKNTQEVFAQVKQIYKTPPIKDFGGFNFSQILPDPSKPSKRSFIEDLLFNKVTLADAGFIKQYGDCLGDIAARDLICAQKFNGLTVLPPLLTDEMIAQYTSALLAGTITCGWTFGAGPCLQIPFAMQMAYRFNGIGVTQNVLYENQKLIANQFNSAIGKIQDSLSSTPSALGKLQDVVNQNAQALNTLVKQLSSNFGAISSVLNDILSRLDPPEAEVQIDRLITGRLQSLQTYVTQQLIRAAEIRASANLAATKMSECVLGQSKRVDFCGKGYHLMSFPQSAPHGVVFLHVTYVPAQEKNFTTAPAICHDGKAHFPREGVFVSNGTHWFVTQRNFYEPQIITTDNTFVSGNCDVVIGIVNNTVYDPLQPELDSFKEELDKYFKNHTSPDVDLGDISGINASVVNIQKEIDRLNEVAKNLNESLIDLQELGKYEQYIKWPWYIWLGFIAGLIAIVMVTIMLCCMTSCCSCLKGCCSCGSCCKFDEDDSEPVLKGVKLHYT

SEQ ID NO: 409 - protein, 1273 aa, Artificial Sequence
  source: /note="Description of Artificial Sequence: Synthetic polypeptide"
MFVFLVLLPLVSSQCVNLTTRTQLPPAYTNSFTRGVYYPDKVFRSSVLHSTQDLFLPFFSNVTWFHAIHVSGTNGTKRFDNPVLPFNDGVYFASTEKSNIIRGWIFGTTLDSKTQSLLIVNNATNVVIKVCEFQFCNDPFLGVYYHKNNKSWMESEFRVYSSANNCTFEYVSQPFLMDLEGKQGNFKNLREFVFKNIDGYFKIYSKHTPINLVRDLPQGFSALEPLVDLPIGINITRFQTLLALHRSYLTPGDSSSGWTAGAAAYYVGYLQPRTFLLKYNENGTITDAVDCALDPLSETKCTLKSFTVEKGIYQTSNFRVQPTESIVRFPNITNLCPFGEVFNATRFASVYAWNRKRISNCVADYSVLYNSASFSTFKCYGVSPTKLNDLCFTNVYADSFVIRGDEVRQIAPGQTGKIADYNYKLPDDFTGCVIAWNSNNLDSKVGGNYNYLYRLFRKSNLKPFERDISTEIYQAGSTPCNGVEGFNCYFPLQSYGFQPTNGVGYQPYRVVVLSFELLHAPATVCGPKKSTPLVKNKCVNFNFNGLTGTGVLTESNKKFLPFQQFGRDIADITDAVRDPQTLEILDITPCSFGGVSVITPGTNTSNQVAVLYQDVNCTEVPVAIHADQLTPTWRVYSTGSNVFQTRAGCLIGAEHVNNSYECDIPIGAGICASYQTQTNSPRRARSVASQSIIAYTMSLGAENSVAYSNNSIAIPTNFTISVTTEILPVSMTKTSVDCTMYICGDSTECSNLLLQYGSFCTQLNRALTGIAVEQDKNTQEVFAQVKQIYKTPPIKDFGGFNFSQILPDPSKPSKRSFIEDLLFNKVTLADAGFIKQYGDCLGDIAARDLICAQKFNGLTVLPPLLTDEMIAQYTSALLACTITSGWTCGAGPALQIPFAMQMAYRFNGIGVTQNVLYENQKLIANQFNSAIGKIQDSLSSTPSALGKLQDVVNQNAQALNTLVKQLSSNFGAISSVLNDILSRLDPPEAEVQIDRLITGRLQSLQTYVTQQLIRAAEIRASANLAATKMSECVLGQSKRVDFCGKGYHLMSFPQSAPHGVVFLHVTYVPAQEKNFTTAPAICHDGKAHFPREGVFVSNGTHWFVTQRNFYEPQIITTDNTFVSGNCDVVIGIVNNTVYDPLQPELDSFKEELDKYFKNHTSPDVDLGDISGINASVVNIQKEIDRLNEVAKNLNESLIDLQELGKYEQYIKWPWYIWLGFIAGLIAIVMVTIMLCCMTSCCSCLKGCCSCGSCCKFDEDDSEPVLKGVKLHYT

SEQ ID NO: 410 - protein, 1273 aa, Artificial Sequence
  source: /note="Description of Artificial Sequence: Synthetic polypeptide"
MFVFLVLLPLVSSQCVNLTTRTQLPPAYTNSFTRGVYYPDKVFRSSVLHSTQDLFLPFFSNVTWFHAIHVSGTNGTKRFDNPVLPFNDGVYFASTEKSNIIRGWIFGTTLDSKTQSLLIVNNATNVVIKVCEFQFCNDPFLGVYYHKNNKSWMESEFRVYSSANNCTFEYVSQPFLMDLEGKQGNFKNLREFVFKNIDGYFKIYSKHTPINLVRDLPQGFSALEPLVDLPIGINITRFQTLLALHRSYLTPGDSSSGWTAGAAAYYVGYLQPRTFLLKYNENGTITDAVDCALDPLSETKCTLKSFTVEKGIYQTSNFRVQPTESIVRFPNITNLCPFGEVFNATRFASVYAWNRKRISNCVADYSVLYNSASFSTFKCYGVSPTKLNDLCFTNVYADSFVIRGDEVRQIAPGQTGKIADYNYKLPDDFTGCVIAWNSNNLDSKVGGNYNYLYRLFRKSNLKPFERDISTEIYQAGSTPCNGVEGFNCYFPLQSYGFQPTNGVGYQPYRVVVLSFELLHAPATVCGPKKSTPLVKNKCVNFNFNGLTGTGVLTESNKKFLPFQQFGRDIADITDAVRDPQTLEILDITPCSFGGVSVITPGTNTSNQVAVLYQDVNCTEVPVAIHADQLTPTWRVYSTGSNVFQTRAGCLIGAEHVNNSYECDIPIGAGICASYQTQTNSPRRARSVASQSIIAYTMSLGAENSVAYSNNSIAIPTNFTISVTTEILPVSMTKTSVDCTMYICGDSTECSNLLLQYGSFCTQLNRALTGIAVEQDKNTQEVFAQVKQIYKTPPIKDFGGFNFSQILPDPSKPSKRSFIEDLLFNKVTLADAGFIKQYGDCLGDIAARDLICAQKFNGLTVLPPLLTDEMIAQYTSALLAGTITCGWTFGAGPCLQIPFAMQMAYRFNGIGVTQNVLYENQKLIANQFNSAIGKIQDSLSSTPSALGKLQDVVNQNAQALNTLVKQLSSNFGAISSVLNDILSRLDPPEAEVQIDRLITGRLQSLQTYVTQQLIRAAEIRASANLAATKMSECVLGQSKRVDFCGKGYHLMSFPQSAPHGVVFLHVTYVPAQEKNFTTAPAICHDGKAHFPREGVFVSNGTHWFVTQRNFYEPQIITTDNTFVSGNCDVVIGIVNNTVYDPLQPELDSFKEELDKYFKNHTSPDVDLGDISGINASVVNIQKEIDRLNEVAKNLNESLIDLQELGKYEQYIKWPWYIWLGFIAGLIAIVMVTIMLCCMTSCCSCLKGCCSCGSCCKFDEDDSEPVLKGVKLHYT

SEQ ID NO: 411 - protein, 1273 aa, Artificial Sequence
  source: /note="Description of Artificial Sequence: Synthetic polypeptide"
MFVFLVLLPLVSSQCVNLTTRTQLPPAYTNSFTRGVYYPDKVFRSSVLHSTQDLFLPFFSNVTWFHAIHVSGTNGTKRFDNPVLPFNDGVYFASTEKSNIIRGWIFGTTLDSKTQSLLIVNNATNVVIKVCEFQFCNDPFLGVYYHKNNKSWMESEFRVYSSANNCTFEYVSQPFLMDLEGKQGNFKNLREFVFKNIDGYFKIYSKHTPINLVRDLPQGFSALEPLVDLPIGINITRFQTLLALHRSYLTPGDSSSGWTAGAAAYYVGYLQPRTFLLKYNENGTITDAVDCALDPLSETKCTLKSFTVEKGIYQTSNFRVQPTESIVRFPNITNLCPFGEVFNATRFASVYAWNRKRISNCVADYSVLYNSASFSTFKCYGVSPTKLNDLCFTNVYADSFVIRGDEVRQIAPGQTGKIADYNYKLPDDFTGCVIAWNSNNLDSKVGGNYNYLYRLFRKSNLKPFERDISTEIYQAGSTPCNGVEGFNCYFPLQSYGFQPTNGVGYQPYRVVVLSFELLHAPATVCGPKKSTPLVKNKCVNFNFNGLTGTGVLTESNKKFLPFQQFGRDIADITDAVRDPQTLEILDITPCSFGGVSVITPGTNTSNQVAVLYQNVNCTEVPVAIHADQLTPTWRVYSTGSNVFQTRAGCLIGAEHVNNSYECDIPIGAGICASYQTQTNSPRRARSVASQSIIAYTMSLGAENSVAYSNNSIAIPTNFTISVTTEILPVSMTKTSVDCTMYICGDSTECSNLLLQYGSFCTQLNRALTGIAVEQDKNTQEVFAQVKQIYKTPPIKDFGGFNFSQILPDPSKPSKRSFIEDLLFNKVTLADAGFIKQYGDCLGDIAARDLICAQKFNGLTVLPPLLTDEMIAQYTSALLACTITSGWTCGAGAALQIPFAMQMAYRFNGIGVTQNVLYENQKLIANQFNSAIGKIQDSLSSTPSALGKLQDVVNQNAQALNTLVKQLSSNFGAISSVLNDILSRLDPPEAEVQIDRLITGRLQSLQTYVTQQLIRAAEIRASANLAATKMSECVLGQSKRVDFCGKGYHLMSFPQSAPHGVVFLHVTYVPAQEKNFTTAPAICHDGKAHFPREGVFVSNGTHWFVTQRNFYEPQIITTDNTFVSGNCDVVIGIVNNTVYDPLQPELDSFKEELDKYFKNHTSPDVDLGDISGINASVVNIQKEIDRLNEVAKNLNESLIDLQELGKYEQYIKWPWYIWLGFIAGLIAIVMVTIMLCCMTSCCSCLKGCCSCGSCCKFDEDDSEPVLKGVKLHYT

SEQ ID NO: 412 - protein, 1273 aa, Artificial Sequence
  source: /note="Description of Artificial Sequence: Synthetic polypeptide"
MFVFLVLLPLVSSQCVNLTTRTQLPPAYTNSFTRGVYYPDKVFRSSVLHSTQDLFLPFFSNVTWFHAIHVSGTNGTKRFDNPVLPFNDGVYFASTEKSNIIRGWIFGTTLDSKTQSLLIVNNATNVVIKVCEFQFCNDPFLGVYYHKNNKSWMESEFRVYSSANNCTFEYVSQPFLMDLEGKQGNFKNLREFVFKNIDGYFKIYSKHTPINLVRDLPQGFSALEPLVDLPIGINITRFQTLLALHRSYLTPGDSSSGWTAGAAAYYVGYLQPRTFLLKYNENGTITDAVDCALDPLSETKCTLKSFTVEKGIYQTSNFRVQPTESIVRFPNITNLCPFGEVFNATRFASVYAWNRKRISNCVADYSVLYNSASFSTFKCYGVSPTKLNDLCFTNVYADSFVIRGDEVRQIAPGQTGKIADYNYKLPDDFTGCVIAWNSNNLDSKVGGNYNYLYRLFRKSNLKPFERDISTEIYQAGSTPCNGVEGFNCYFPLQSYGFQPTNGVGYQPYRVVVLSFELLHAPATVCGPKKSTPLVKNKCVNFNFNGLTGTGVLTESNKKFLPFQQFGRDIADITDAVRDPQTLEILDITPCSFGGVSVITPGTNTSNQVAVLYQNVNCTEVPVAIHADQLTPTWRVYSTGSNVFQTRAGCLIGAEHVNNSYECDIPIGAGICASYQTQTNSPRRARSVASQSIIAYTMSLGAENSVAYSNNSIAIPTNFTISVTTEILPVSMTKTSVDCTMYICGDSTECSNLLLQYGSFCTQLNRALTGIAVEQDKNTQEVFAQVKQIYKTPPIKDFGGFNFSQILPDPSKPSKRSFIEDLLFNKVTLADAGFIKQYGDCLGDIAARDLICAQKFNGLTVLPPLLTDEMIAQYTSALLAGTITCGWTFGAGACLQIPFAMQMAYRFNGIGVTQNVLYENQKLIANQFNSAIGKIQDSLSSTPSALGKLQDVVNQNAQALNTLVKQLSSNFGAISSVLNDILSRLDPPEAEVQIDRLITGRLQSLQTYVTQQLIRAAEIRASANLAATKMSECVLGQSKRVDFCGKGYHLMSFPQSAPHGVVFLHVTYVPAQEKNFTTAPAICHDGKAHFPREGVFVSNGTHWFVTQRNFYEPQIITTDNTFVSGNCDVVIGIVNNTVYDPLQPELDSFKEELDKYFKNHTSPDVDLGDISGINASVVNIQKEIDRLNEVAKNLNESLIDLQELGKYEQYIKWPWYIWLGFIAGLIAIVMVTIMLCCMTSCCSCLKGCCSCGSCCKFDEDDSEPVLKGVKLHYT

SEQ ID NO: 413 - protein, 1273 aa, Artificial Sequence
  source: /note="Description of Artificial Sequence: Synthetic polypeptide"
MFVFLVLLPLVSSQCVNLTTRTQLPPAYTNSFTRGVYYPDKVFRSSVLHSTQDLFLPFFSNVTWFHAIHVSGTNGTKRFDNPVLPFNDGVYFASTEKSNIIRGWIFGTTLDSKTQSLLIVNNATNVVIKVCEFQFCNDPFLGVYYHKNNKSWMESEFRVYSSANNCTFEYVSQPFLMDLEGKQGNFKNLREFVFKNIDGYFKIYSKHTPINLVRDLPQGFSALEPLVDLPIGINITRFQTLLALHRSYLTPGDSSSGWTAGAAAYYVGYLQPRTFLLKYNENGTITDAVDCALDPLSETKCTLKSFTVEKGIYQTSNFRVQPTESIVRFPNITNLCPFGEVFNATRFASVYAWNRKRISNCVADYSVLYNSASFSTFKCYGVSPTKLNDLCFTNVYADSFVIRGDEVRQIAPGQTGKIADYNYKLPDDFTGCVIAWNSNNLDSKVGGNYNYLYRLFRKSNLKPFERDISTEIYQAGSTPCNGVEGFNCYFPLQSYGFQPTNGVGYQPYRVVVLSFELLHAPATVCGPKKSTPLVKNKCVNFNFNGLTGTGVLTESNKKFLPFQQFGRDIADITDAVRDPQTLEILDITPCSFGGVSVITPGTNTSNQVAVLYQNVNCTEVPVAIHADQLTPTWRVYSTGSNVFQTRAGCLIGAEHVNNSYECDIPIGAGICASYQTQTNSPRRARSVASQSIIAYTMSLGAENSVAYSNNSIAIPTNFTISVTTEILPVSMTKTSVDCTMYICGDSTECSNLLLQYGSFCTQLNRALTGIAVEQDKNTQEVFAQVKQIYKTPPIKDFGGFNFSQILPDPSKPSKRSFIEDLLFNKVTLADAGFIKQYGDCLGDIAARDLICAQKFNGLTVLPPLLTDEMIAQYTSALLACTITSGWTCGAGPALQIPFAMQMAYRFNGIGVTQNVLYENQKLIANQFNSAIGKIQDSLSSTASALGKLQDVVNQNAQALNTLVKQLSSNFGAISSVLNDILSRLDPPEAEVQIDRLITGRLQSLQTYVTQQLIRAAEIRASANLAATKMSECVLGQSKRVDFCGKGYHLMSFPQSAPHGVVFLHVTYVPAQEKNFTTAPAICHDGKAHFPREGVFVSNGTHWFVTQRNFYEPQIITTDNTFVSGNCDVVIGIVNNTVYDPLQPELDSFKEELDKYFKNHTSPDVDLGDISGINASVVNIQKEIDRLNEVAKNLNESLIDLQELGKYEQYIKWPWYIWLGFIAGLIAIVMVTIMLCCMTSCCSCLKGCCSCGSCCKFDEDDSEPVLKGVKLHYT

SEQ ID NO: 414 - protein, 1273 aa, Artificial Sequence
  source: /note="Description of Artificial Sequence: Synthetic polypeptide"
MFVFLVLLPLVSSQCVNLTTRTQLPPAYTNSFTRGVYYPDKVFRSSVLHSTQDLFLPFFSNVTWFHAIHVSGTNGTKRFDNPVLPFNDGVYFASTEKSNIIRGWIFGTTLDSKTQSLLIVNNATNVVIKVCEFQFCNDPFLGVYYHKNNKSWMESEFRVYSSANNCTFEYVSQPFLMDLEGKQGNFKNLREFVFKNIDGYFKIYSKHTPINLVRDLPQGFSALEPLVDLPIGINITRFQTLLALHRSYLTPGDSSSGWTAGAAAYYVGYLQPRTFLLKYNENGTITDAVDCALDPLSETKCTLKSFTVEKGIYQTSNFRVQPTESIVRFPNITNLCPFGEVFNATRFASVYAWNRKRISNCVADYSVLYNSASFSTFKCYGVSPTKLNDLCFTNVYADSFVIRGDEVRQIAPGQTGKIADYNYKLPDDFTGCVIAWNSNNLDSKVGGNYNYLYRLFRKSNLKPFERDISTEIYQAGSTPCNGVEGFNCYFPLQSYGFQPTNGVGYQPYRVVVLSFELLHAPATVCGPKKSTPLVKNKCVNFNFNGLTGTGVLTESNKKFLPFQQFGRDIADITDAVRDPQTLEILDITPCSFGGVSVITPGTNTSNQVAVLYQNVNCTEVPVAIHADQLTPTWRVYSTGSNVFQTRAGCLIGAEHVNNSYECDIPIGAGICASYQTQTNSPRRARSVASQSIIAYTMSLGAENSVAYSNNSIAIPTNFTISVTTEILPVSMTKTSVDCTMYICGDSTECSNLLLQYGSFCTQLNRALTGIAVEQDKNTQEVFAQVKQIYKTPPIKDFGGFNFSQILPDPSKPSKRSFIEDLLFNKVTLADAGFIKQYGDCLGDIAARDLICAQKFNGLTVLPPLLTDEMIAQYTSALLAGTITCGWTFGAGPCLQIPFAMQMAYRFNGIGVTQNVLYENQKLIANQFNSAIGKIQDSLSSTASALGKLQDVVNQNAQALNTLVKQLSSNFGAISSVLNDILSRLDPPEAEVQIDRLITGRLQSLQTYVTQQLIRAAEIRASANLAATKMSECVLGQSKRVDFCGKGYHLMSFPQSAPHGVVFLHVTYVPAQEKNFTTAPAICHDGKAHFPREGVFVSNGTHWFVTQRNFYEPQIITTDNTFVSGNCDVVIGIVNNTVYDPLQPELDSFKEELDKYFKNHTSPDVDLGDISGINASVVNIQKEIDRLNEVAKNLNESLIDLQELGKYEQYIKWPWYIWLGFIAGLIAIVMVTIMLCCMTSCCSCLKGCCSCGSCCKFDEDDSEPVLKGVKLHYT

SEQ ID NO: 415 - protein, 1273 aa, Artificial Sequence
  source: /note="Description of Artificial Sequence: Synthetic polypeptide"
MFVFLVLLPLVSSQCVNLTTRTQLPPAYTNSFTRGVYYPDKVFRSSVLHSTQDLFLPFFSNVTWFHAIHVSGTNGTKRFDNPVLPFNDGVYFASTEKSNIIRGWIFGTTLDSKTQSLLIVNNATNVVIKVCEFQFCNDPFLGVYYHKNNKSWMESEFRVYSSANNCTFEYVSQPFLMDLEGKQGNFKNLREFVFKNIDGYFKIYSKHTPINLVRDLPQGFSALEPLVDLPIGINITRFQTLLALHRSYLTPGDSSSGWTAGAAAYYVGYLQPRTFLLKYNENGTITDAVDCALDPLSETKCTLKSFTVEKGIYQTSNFRVQPTESIVRFPNITNLCPFGEVFNATRFASVYAWNRKRISNCVADYSVLYNSASFSTFKCYGVSPTKLNDLCFTNVYADSFVIRGDEVRQIAPGQTGKIADYNYKLPDDFTGCVIAWNSNNLDSKVGGNYNYLYRLFRKSNLKPFERDISTEIYQAGSTPCNGVEGFNCYFPLQSYGFQPTNGVGYQPYRVVVLSFELLHAPATVCGPKKSTPLVKNKCVNFNFNGLTGTGVLTESNKKFLPFQQFGRDIADITDAVRDPQTLEILDITPCSFGGVSVITPGTNTSNQVAVLYQNVNCTEVPVAIHADQLTPTWRVYSTGSNVFQTRAGCLIGAEHVNNSYECDIPIGAGICASYQTQTNSPRRARSVASQSIIAYTMSLGAENSVAYSNNSIAIPTNFTISVTTEILPVSMTKTSVDCTMYICGDSTECSNLLLQYGSFCTQLNRALTGIAVEQDKNTQEVFAQVKQIYKTPPIKDFGGFNFSQILPDPSKPSKRSFIEDLLFNKVTLADAGFIKQYGDCLGDIAARDLICAQKFNGLTVLPPLLTDEMIAQYTSALLACTITSGWTCGAGPALQIPFAMQMAYRFNGIGVTQNVLYENQKLIANQFNSAIGKIQDSLSSTPSALGKLQDVVNQNAQALNTLVKQLSSNFGAISSVLNDILSRLDPPEAEVQIDRLITGRLQSLQTYVTQQLIRAAEIRASANLAATKMSECVLGQSKRVDFCGKGYHLMSFPQSAPHGVVFLHVTYVPAQEKNFTTAPAICHDGKAHFPREGVFVSNGTHWFVTQRNFYEPQIITTDNTFVSGNCDVVIGIVNNTVYDPLQPELDSFKEELDKYFKNHTSPDVDLGDISGINASVVNIQKEIDRLNEVAKNLNESLIDLQELGKYEQYIKWPWYIWLGFIAGLIAIVMVTIMLCCMTSCCSCLKGCCSCGSCCKFDEDDSEPVLKGVKLHYT

SEQ ID NO: 416 - protein, 1273 aa, Artificial Sequence
  source: /note="Description of Artificial Sequence: Synthetic polypeptide"
MFVFLVLLPLVSSQCVNLTTRTQLPPAYTNSFTRGVYYPDKVFRSSVLHSTQDLFLPFFSNVTWFHAIHVSGTNGTKRFDNPVLPFNDGVYFASTEKSNIIRGWIFGTTLDSKTQSLLIVNNATNVVIKVCEFQFCNDPFLGVYYHKNNKSWMESEFRVYSSANNCTFEYVSQPFLMDLEGKQGNFKNLREFVFKNIDGYFKIYSKHTPINLVRDLPQGFSALEPLVDLPIGINITRFQTLLALHRSYLTPGDSSSGWTAGAAAYYVGYLQPRTFLLKYNENGTITDAVDCALDPLSETKCTLKSFTVEKGIYQTSNFRVQPTESIVRFPNITNLCPFGEVFNATRFASVYAWNRKRISNCVADYSVLYNSASFSTFKCYGVSPTKLNDLCFTNVYADSFVIRGDEVRQIAPGQTGKIADYNYKLPDDFTGCVIAWNSNNLDSKVGGNYNYLYRLFRKSNLKPFERDISTEIYQAGSTPCNGVEGFNCYFPLQSYGFQPTNGVGYQPYRVVVLSFELLHAPATVCGPKKSTPLVKNKCVNFNFNGLTGTGVLTESNKKFLPFQQFGRDIADITDAVRDPQTLEILDITPCSFGGVSVITPGTNTSNQVAVLYQNVNCTEVPVAIHADQLTPTWRVYSTGSNVFQTRAGCLIGAEHVNNSYECDIPIGAGICASYQTQTNSPRRARSVASQSIIAYTMSLGAENSVAYSNNSIAIPTNFTISVTTEILPVSMTKTSVDCTMYICGDSTECSNLLLQYGSFCTQLNRALTGIAVEQDKNTQEVFAQVKQIYKTPPIKDFGGFNFSQILPDPSKPSKRSFIEDLLFNKVTLADAGFIKQYGDCLGDIAARDLICAQKFNGLTVLPPLLTDEMIAQYTSALLAGTITCGWTFGAGPCLQIPFAMQMAYRFNGIGVTQNVLYENQKLIANQFNSAIGKIQDSLSSTPSALGKLQDVVNQNAQALNTLVKQLSSNFGAISSVLNDILSRLDPPEAEVQIDRLITGRLQSLQTYVTQQLIRAAEIRASANLAATKMSECVLGQSKRVDFCGKGYHLMSFPQSAPHGVVFLHVTYVPAQEKNFTTAPAICHDGKAHFPREGVFVSNGTHWFVTQRNFYEPQIITTDNTFVSGNCDVVIGIVNNTVYDPLQPELDSFKEELDKYFKNHTSPDVDLGDISGINASVVNIQKEIDRLNEVAKNLNESLIDLQELGKYEQYIKWPWYIWLGFIAGLIAIVMVTIMLCCMTSCCSCLKGCCSCGSCCKFDEDDSEPVLKGVKLHYT

SEQ ID NO: 417 - protein, 1208 aa, Artificial Sequence
  source: /note="Description of Artificial Sequence: Synthetic polypeptide"
MFVFLVLLPLVSSQCVNLTTRTQLPPAYTNSFTRGVYYPDKVFRSSVLHSTQDLFLPFFSNVTWFHAIHVSGTNGTKRFDNPVLPFNDGVYFASTEKSNIIRGWIFGTTLDSKTQSLLIVNNATNVVIKVCEFQFCNDPFLGVYYHKNNKSWMESEFRVYSSANNCTFEYVSQPFLMDLEGKQGNFKNLREFVFKNIDGYFKIYSKHTPINLVRDLPQGFSALEPLVDLPIGINITRFQTLLALHRSYLTPGDSSSGWTAGAAAYYVGYLQPRTFLLKYNENGTITDAVDCALDPLSETKCTLKSFTVEKGIYQTSNFRVQPTESIVRFPNITNLCPFGEVFNATRFASVYAWNRKRISNCVADYSVLYNSASFSTFKCYGVSPTKLNDLCFTNVYADSFVIRGDEVRQIAPGQTGKIADYNYKLPDDFTGCVIAWNSNNLDSKVGGNYNYLYRLFRKSNLKPFERDISTEIYQAGSTPCNGVEGFNCYFPLQSYGFQPTNGVGYQPYRVVVLSFELLHAPATVCGPKKSTPLVKNKCVNFNFNGLTGTGVLTESNKKFLPFQQFGRDIADITDAVRDPQTLEILDITPCSFGGVSVITPGTNTSNQVAVLYQGVNCTEVPVAIHADQLTPTWRVYSTGSNVFQTRAGCLIGAEHVNNSYECDIPIGAGICASYQTQTNSPSRAGSVASQSIIAYTMSLGAENSVAYSNNSIAIPTNFTISVTTEILPVSMTKTSVDCTMYICGDSTECSNLLLQYGSFCTQLNRALTGIAVEQDKNTQEVFAQVKQIYKTPPIKDFGGFNFSQILPDPSKPSKRSFIEDLLFNKVTLADAGFIKQYGDCLGDIAARDLICAQKFNGLTVLPPLLTDEMIAQYTSALLACTITSGWTCGAGAALQIPFAMQMAYRFNGIGVTQNVLYENQKLIANQFNSAIGKIQDSLSSTASPLGKLQDVVNQNAQALNTLVKQLSSNFGAISSVLNDILSRLDKPEAEVQIDRLITGRLQSLQTYVTQQLIRAAEIRASANLAATKMSECVLGQSKRVDFCGKGYHLMSFPQSAPHGVVFLHVTYVPAQEKNFTTAPAICHDGKAHFPREGVFVSNGTHWFVTQRNFYEPQIITTDNTFVSGNCDVVIGIVNNTVYDPLQPELDSFKEELDKYFKNHTSPDVDLGDISGINASVVNIQKEIDRLNEVAKNLNESLIDLQELGKYEQ

SEQ ID NO: 418 - protein, 1208 aa, Artificial Sequence
  source: /note="Description of Artificial Sequence: Synthetic polypeptide"
MFVFLVLLPLVSSQCVNLTTRTQLPPAYTNSFTRGVYYPDKVFRSSVLHSTQDLFLPFFSNVTWFHAIHVSGTNGTKRFDNPVLPFNDGVYFASTEKSNIIRGWIFGTTLDSKTQSLLIVNNATNVVIKVCEFQFCNDPFLGVYYHKNNKSWMESEFRVYSSANNCTFEYVSQPFLMDLEGKQGNFKNLREFVFKNIDGYFKIYSKHTPINLVRDLPQGFSALEPLVDLPIGINITRFQTLLALHRSYLTPGDSSSGWTAGAAAYYVGYLQPRTFLLKYNENGTITDAVDCALDPLSETKCTLKSFTVEKGIYQTSNFRVQPTESIVRFPNITNLCPFGEVFNATRFASVYAWNRKRISNCVADYSVLYNSASFSTFKCYGVSPTKLNDLCFTNVYADSFVIRGDEVRQIAPGQTGKIADYNYKLPDDFTGCVIAWNSNNLDSKVGGNYNYLYRLFRKSNLKPFERDISTEIYQAGSTPCNGVEGFNCYFPLQSYGFQPTNGVGYQPYRVVVLSFELLHAPATVCGPKKSTNLVKNKCVNFNFNGLTGTGVLTESNKKFLPFQQFGRDIADTTDAVRDPQTLEILDITPCSFGGVSVITPGTNTSNQVAVLYQNVNCTEVPVAIHADQLTPTWRVYSTGSNVFQTRAGCLIGAEHVNNSYECDIPIGAGICASYQTQTNSPSRAGSVASQSIIAYTMSLGAENSVAYSNNSIAIPTNFTISVTTEILPVSMTKTSVDCTMYICGDSTECSNLLLQYGSFCTQLNRALTGIAVEQDKNTQEVFAQVKQIYKTPPIKDFGGFNFSQILPDPSKPSKRSFIEDLLFNKVTLADAGFIKQYGDCLGDIAARDLICAQKFNGLTVLPPLLTDEMIAQYTSALLAGTITSGWTFGAGPALQIPFAMQMAYRFNGIGVTQNVLYENQKLIANQFNSAIGKIQDSLSSTPSALGKLQDVVNQNAQALNTLVKQLSSNFGAISSVLNDILSRLDKPEAEVQIDRLITGRLQSLQTYVTQQLIRAAEIRASANLAATKMSECVLGQSKRVDFCGKGYHLMSFPQSAPHGVVFLHVTYVPAQEKNFTTAPAICHDGKAHFPREGVFVSNGTHWFVTQRNFYEPQIITTDNTFVSGNCDVVIGIVNNTVYDPLQPELDSFKEELDKYFKNHTSPDVDLGDISGINASVVNIQKEIDRLNEVAKNLNESLIDLQELGKYEQ

SEQ ID NO: 419 - protein, 1248 aa, Artificial Sequence
  source: /note="Description of Artificial Sequence: Synthetic polypeptide"
MFVFLVLLPLVSSQCVNLTTRTQLPPAYTNSFTRGVYYPDKVFRSSVLHSTQDLFLPFFSNVTWFHAIHVSGTNGTKRFDNPVLPFNDGVYFASTEKSNIIRGWIFGTTLDSKTQSLLIVNNATNVVIKVCEFQFCNDPFLGVYYHKNNKSWMESEFRVYSSANNCTFEYVSQPFLMDLEGKQGNFKNLREFVFKNIDGYFKIYSKHTPINLVRDLPQGFSALEPLVDLPIGINITRFQTLLALHRSYLTPGDSSSGWTAGAAAYYVGYLQPRTFLLKYNENGTITDAVDCALDPLSETKCTLKSFTVEKGIYQTSNFRVQPTESIVRFPNITNLCPFGEVFNATRFASVYAWNRKRISNCVADYSVLYNSASFSTFKCYGVSPTKLNDLCFTNVYADSFVIRGDEVRQIAPGQTGKIADYNYKLPDDFTGCVIAWNSNNLDSKVGGNYNYLYRLFRKSNLKPFERDISTEIYQAGSTPCNGVEGFNCYFPLQSYGFQPTNGVGYQPYRVVVLSFELLHAPATVCGPKKSTNLVKNKCVNFNFNGLTGTGVLTESNKKFLPFQQFGRDIADTTDAVRDPQTLEILDITPCSFGGVSVITPGTNTSNQVAVLYQDVNCTEVPVAIHADQLTPTWRVYSTGSNVFQTRAGCLIGAEHVNNSYECDIPIGAGICASYQTQTNSPSRAGSVASQSIIAYTMSLGAENSVAYSNNSIAIPTNFTISVTTEILPVSMTKTSVDCTMYICGDSTECSNLLLQYGSFCTQLNRALTGIAVEQDKNTQEVFAQVKQIYKTPPIKDFGGFNFSQILPDPSKPSKRSFIEDLLFNKVTLADAGFIKQYGDCLGDIAARDLICAQKFNGLTVLPPLLTDEMIAQYTSALLAGTITSGWTFGAGAALQIPFAMQMAYRFNGIGVTQNVLYENQKLIANQFNSAIGKIQDSLSSTPSALGKLQDVVNQNAQALNTLVKQLSSNFGAISSVLNDILSRLDPPEAEVQIDRLITGRLQSLQTYVTQQLIRAAEIRASANLAATKMSECVLGQSKRVDFCGKGYHLMSFPQSAPHGVVFLHVTYVPAQEKNFTTAPAICHDGKAHFPREGVFVSNGTHWFVTQRNFYEPQIITTDNTFVSGNCDVVIGIVNNTVYDPLQPELDSFKEELDKYFKNHTSPDVDLGDISGINASVVNIQKEIDRLNEVAKNLNESLIDLQELGKYEQGSGYIPEAPRDGQAYVRKDGEWVLLSTFLLPATGGSEPEA

SEQ ID NO: 420 - protein, 1208 aa, Artificial Sequence
  source: /note="Description of Artificial Sequence: Synthetic polypeptide"
MFVFLVLLPLVSSQCVNLTTRTQLPPAYTNSFTRGVYYPDKVFRSSVLHSTQDLFLPFFSNVTWFHAIHVSGTNGTKRFDNPVLPFNDGVYFASTEKSNIIRGWIFGTTLDSKTQSLLIVNNATNVVIKVCEFQFCNDPFLGVYYHKNNKSWMESEFRVYSSANNCTFEYVSQPFLMDLEGKQGNFKNLREFVFKNIDGYFKIYSKHTPINLVRDLPQGFSALEPLVDLPIGINITRFQTLLALHRSYLTPGDSSSGWTAGAAAYYVGYLQPRTFLLKYNENGTITDAVDCALDPLSETKCTLKSFTVEKGIYQTSNFRVQPTESIVRFPNITNLCPFGEVFNATRFASVYAWNRKRISNCVADYSVLYNSASFSTFKCYGVSPTKLNDLCFTNVYADSFVIRGDEVRQIAPGQTGKIADYNYKLPDDFTGCVIAWNSNNLDSKVGGNYNYLYRLFRKSNLKPFERDISTEIYQAGSTPCNGVEGFNCYFPLQSYGFQPTNGVGYQPYRVVVLSFELLHAPATVCGPKKSTPLVKNKCVNFNFNGLTGTGVLTESNKKFLPFQQFGRDIADITDAVRDPQTLEILDITPCSFGGVSVITPGTNTSNQVAVLYQGVNCTEVPVAIHADQLTPTWRVYSTGSNVFQTRAGCLIGAEHVNNSYECDIPIGAGICASYQTQTNSPSRAGSVASQSIIAYTMSLGAENSVAYSNNSIAIPTNFTISVTTEILPVSMTKTSVDCTMYICGDSTECSNLLLQYGSFCTQLNRALTGIAVEQDKNTQEVFAQVKQIYKTPPIKDFGGFNFSQILPDPSKPSKRSFIEDLLFNKVTLADAGFIKQYGDCLGDIAARDLICAQKFNGLTVLPPLLTDEMIAQYTSALLACTITSGWTCGAGAALQIPFAMQMAYRFNGIGVTQNVLYENQKLIANQFNSAIGKIQDSLSSTASPLGKLQDVVNQNAQALNTLVKQLSSNFGAISSVLNDILSRLDKVEAEVQIDRLITGRLQSLQTYVTQQLIRAAEIRASANLAATKMSECVLGQSKRVDFCGKGYHLMSFPQSAPHGVVFLHVTYVPAQEKNFTTAPAICHDGKAHFPREGVFVSNGTHWFVTQRNFYEPQIITTDNTFVSGNCDVVIGIVNNTVYDPLQPELDSFKEELDKYFKNHTSPDVDLGDISGINASVVNIQKEIDRLNEVAKNLNESLIDLQELGKYEQ

SEQ ID NO: 421 - protein, 1297 aa, Artificial Sequence; identical to SEQ ID NO: 3
  source: /note="Description of Artificial Sequence: Synthetic polypeptide"

SEQ ID NO: 422 - protein, 35 aa, Artificial Sequence
  source: /note="Description of Artificial Sequence: Synthetic polypeptide"
GGGGSGGGGSGGGGSGGGGSGGGGSGGGGSGGGGS

1. Recombinant pre-fusion SARS-COV-2 S protein, or a fragment thereof, comprising an S1 and an S2 domain, and comprising at least one mutation selected from the group consisting of a mutation of at least one amino acid in the loop region corresponding to amino acid residues 941-945 into P, a mutation of the amino acid at position 892, a mutation of the amino acid at position 614, a mutation at position 572, a mutation at position 532, a disulfide bridge between residues 880 and 888, and a disulfide bridge between residues 884 and 893, wherein the numbering of the amino acid positions is according to the numbering of the amino acid positions in SEQ ID NO: 1.

2. The protein, or fragment thereof, according to claim 1, comprising an amino acid sequence wherein the amino acid at position 892 is not alanine (A), the amino acid at position 614 is not aspartic acid (D), the amino acid at position 532 is not Asparagine (N) and/or amino acid at position 572 is not threonine (T).

3. The protein, or fragment thereof, according to claim 1, comprising a mutation of at least one amino acid in the loop region corresponding to amino acid residues 941-945 into P, and a mutation selected from the group consisting of a mutation of the amino acid at position 892, a mutation of the amino acid at position 614, a mutation at position 572, a mutation at position 532, a disulfide bridge between residues 880 and 888 and a disulfide bridge between residues 884 and 893.

4. The protein, or fragment thereof, according to claim 3, comprising a mutation of at least one amino acid in the loop region corresponding to amino acid residues 941-945 into P, and a mutation selected from the group consisting of a mutation of the amino acid at position 892, a mutation of the amino acid at position 614, a mutation at position 572, a mutation at position 532, a disulfide bridge between residues 880 and 888 and a disulfide bridge between residues 884 and 893, provided that the proteins do not comprise both the disulfide bridge between residues 880 and 888 and the disulfide bridge between residues 884 and 893.

5. The protein, or fragment thereof, according to claim 1, wherein the disulfide bridge is a disulfide bridge between residues 880 and 888.

6. The protein, or fragment thereof, according to claim 1, wherein at least one mutation in the loop region corresponding to amino acid residues 941-945 is a mutation of the amino acid at position 942 into P.

7. The protein, or fragment thereof, according to claim 1, wherein the at least one mutation in the loop region corresponding to amino acid residues 941-945 is a mutation of the amino acid at position 941 into P.

8. The protein, or fragment thereof, according to claim 1, wherein the at least one mutation in the loop region corresponding to amino acid residues 941-945 is a mutation of the amino acid at position 944 into P.

9. The protein, or fragment thereof, according to claim 1, wherein the mutation at position 892 is a mutation into P.

10. The protein, or fragment thereof, according to claim 1, wherein the mutation at position 614 is a mutation into N or G.

11. The protein, or fragment thereof, according to claim 1, wherein the mutation at position 532 is a mutation into P.

12. The protein, or fragment thereof, according to claim 1, wherein the mutation at position 572 is a mutation into I.

13. The protein, or fragment thereof, according to claim 1, comprising an amino acid sequence wherein the amino acid at position 892 is proline (P), the amino acid at position 614 is glycine (G), the amino acid at position 942 is proline (P) and/or the amino acid at position 944 is proline (P).

14. The protein, or fragment thereof, according to claim 1, further comprising a deletion of the furin cleavage site.

15. The protein, or fragment thereof, according to claim 14, wherein the deletion of the furin cleavage site comprises a mutation of the amino acid at position 682 into S and/or a mutation of the amino acid at position 685 into G.

16. The protein, or fragment thereof, according to claim 1, further comprising a mutation of the amino acids at position 986 and/or 987 into P.

17. The protein according to claim 1, comprising an amino acid sequence selected from the group consisting of SEQ ID NO: 5-194 and SEQ ID NO: 197-418, SEQ ID NO: 420 and SEQ ID NO: 421, or a fragment thereof.

18. The protein, or fragment thereof, according to claim 1, wherein the protein, or fragment thereof, does not comprise a signal peptide or a tag sequence.

19. The protein, or fragment thereof, according to claim 1, comprising a truncated S2 domain.

20. The protein, or fragment thereof, according to claim 18 wherein the transmembrane and cytoplasmic domain have been removed.

21. The protein, or fragment thereof, according to claim 18, wherein a heterologous trimerization domain has been linked to the truncated S2 domain.

22. The protein, or fragment thereof, according to claim 21, wherein the heterologous trimerization domain is a foldon domain comprising the amino acid sequence of SEQ ID NO:4.

23. Nucleic acid molecule encoding a protein, or fragment thereof, according to claim 1.

24. Nucleic acid according to claim 23, wherein the nucleic acid molecule is DNA or RNA.

25. Vector comprising a nucleic acid according to claim 23.

26. Vector according to claim 25, wherein the vector is a human recombinant adenoviral vector.

27. A composition comprising a protein according to claim 1.

28. A vaccine against COVID-19 comprising a protein, or fragment thereof, according to claim 1.

29. A method for vaccinating a subject against COVID-19, the method comprising administering to the subject a vaccine according to claim 28.

30. A method for reducing infection and/or replication of SARS-COV-2 in a subject, comprising administering to the subject a composition according to claim 27.

31. An isolated host cell comprising a nucleic acid according to claim 23.

32. An isolated host cell comprising a recombinant human adenovirus of serotype 26 comprising a nucleic acid according to claim 23.
